(19) United States
(12) Patent Application Publication
(10) Pub. No.: US 2006/0068382 A1
(43) Pub. Date: Mar. 30, 2006

(54) Isolated human transporter proteins, nucleic acid molecules encoding human transporter proteins, and uses thereof

(76) Inventors: Ellen M. Beasley, Darnestown, MD (US); Marion Webster, San Francisco, CA (US); Karen A. Ketchum, Germantown, MD (US); Ming-Hui Wei, Germantown, MD (US); Gennady V. Merkulov, Baltimore, MD (US); Shiaoping Zhu, Gaithersburg, MD (US); Valentina Di Francesco, Rockville, MD (US)

Correspondence Address: CELERA GENOMICS;ATTN: WAYNE MONTGOMERY, VICE PRES, INTEL PROPERTY, 45 WEST GUDE DRIVE, C2-4#20, ROCKVILLE, MD, 20850, US

(21) Appl. No.: 09/824,575

(22) Filed: Apr. 3, 2001

Related U.S. Application Data
(60) Provisional application No. 60/250,349, filed on Dec. 1, 2000.

(51) Int. Cl. C12Q 1/68; G01N 33/53; C07H 21/04; C12P 21/06; C07K 14/705

(52) U.S. Cl. 435/6; 435/69.1; 435/320.1; 435/325; 530/350; 435/7.1; 536/23.5

(57) ABSTRACT

The present invention provides amino acid sequences of peptides that are encoded by genes within the human genome, the transporter peptides of the present invention. The present invention specifically provides isolated peptide and nucleic acid molecules, methods of identifying orthologs and paralogs of the transporter peptides, and methods of identifying modulators of the transporter peptides.

### RELATED APPLICATIONS

[0001] The present application claims priority to provisional application U.S. Ser. No. 60/250,349 filed Dec. 1, 2000 (Atty. Docket CL000998-PROV).

### FIELD OF THE INVENTION

[0002] The present invention is in the field of transporter proteins that are related to the ATPase transporter subfamily, recombinant DNA molecules, and protein production. The present invention specifically provides novel peptides and proteins that effect ligand transport and nucleic acid molecules encoding such peptide and protein molecules, all of which are useful in the development of human therapeutics and diagnostic compositions and methods.

### BACKGROUND OF THE INVENTION

[0003] Transporters

[0004] Transporter proteins regulate many different functions of a cell, including cell proliferation, differentiation, and signaling processes, by regulating the flow of molecules such as ions and macromolecules, into and out of cells. Transporters are found in the plasma membranes of virtually every cell in eukaryotic organisms. Transporters mediate a variety of cellular functions including regulation of membrane potentials and absorption and secretion of molecules and ion across cell membranes. When present in intracellular membranes of the Golgi apparatus and endocytic vesicles, transporters, such as chloride channels, also regulate organelle pH. For a review, see Greger, R. (1988) Annu. Rev. Physiol. 50:111-122.

[0005] Transporters are generally classified by structure and the type of mode of action. In addition, transporters are sometimes classified by the molecule type that is transported, for example, sugar transporters, chlorine channels, potassium channels, etc. There may be many classes of channels for transporting a single type of molecule (a detailed review of channel types can be found at Alexander, S. P. H. and J. A. Peters: Receptor and transporter nomenclature supplement. Trends Pharmacol. Sci., Elsevier, pp. 65-68 (1997).

[0006] The following general classification scheme is known in the art and is followed in the present discoveries.

[0007] Channel-type transporters. Transmembrane channel proteins of this class are ubiquitously found in the membranes of all types of organisms from bacteria to higher eukaryotes. Transport systems of this type catalyze facilitated diffusion (by an energy-independent process) by passage through a transmembrane aqueous pore or channel without evidence for a carrier-mediated mechanism. These channel proteins usually consist largely of a-helical spanners, although b-strands may also be present and may even comprise the channel. However, outer membrane porin-type channel proteins are excluded from this class and are instead included in class 9.

[0008] Carrier-type transporters. Transport systems are included in this class if they utilize a carrier-mediated process to catalyze uniport (a single species is transported by facilitated diffusion), antiport (two or more species are transported in opposite directions in a tightly coupled process, not coupled to a direct form of energy other than chemiosmotic energy) and/or symport (two or more species are transported together in the same direction in a tightly coupled process, not coupled to a direct form of energy other than chemiosmotic energy).

[0009] Pyrophosphate bond hydrolysis-driven active transporters. Transport systems are included in this class if they hydrolyze pyrophosphate or the terminal pyrophosphate bond in ATP or another nucleoside triphosphate to drive the active uptake and/or extrusion of a solute or solutes. The transport protein may or may not be transiently phosphorylated, but the substrate is not phosphorylated.

[0010] PEP-dependent, phosphoryl transfer-driven group translocators. Transport systems of the bacterial phosphoenolpyruvate:sugar phosphotransferase system are included in this class. The product of the reaction, derived from extracellular sugar, is a cytoplasmic sugar-phosphate.

[0011] Decarboxylation-driven active transporters. Transport systems that drive solute (e.g., ion) uptake or extrusion by decarboxylation of a cytoplasmic substrate are included in this class.

[0012] Oxidoreduction-driven active transporters. Transport systems that drive transport of a solute (e.g., an ion) energized by the flow of electrons from a reduced substrate to an oxidized substrate are included in this class.

[0013] Light-driven active transporters. Transport systems that utilize light energy to drive transport of a solute (e.g., an ion) are included in this class.

[0014] Mechanically-driven active transporters. Transport systems are included in this class if they drive movement of a cell or organelle by allowing the flow of ions (or other solutes) through the membrane down their electrochemical gradients.

[0015] Outer-membrane porins (of b-structure). These proteins form transmembrane pores or channels that usually allow the energy independent passage of solutes across a membrane. The transmembrane portions of these proteins consist exclusively of b-strands that form a b-barrel. These porin-type proteins are found in the outer membranes of Gram-negative bacteria, mitochondria and eukaryotic plastids.

[0016] Methyltransferase-driven active transporters. A single characterized protein currently falls into this category, the Na+-transporting methyltetrahydromethanopterin:coenzyme M methyltransferase.

[0017] Non-ribosome-synthesized channel-forming peptides or peptide-like molecules. These molecules, usually chains of L- and D-amino acids as well as other small molecular building blocks such as lactate, form oligomeric transmembrane ion channels. Voltage may induce channel formation by promoting assembly of the transmembrane channel. These peptides are often made by bacteria and fungi as agents of biological warfare.

[0018] Non-Proteinaceous Transport Complexes. Ion conducting substances in biological membranes that do not consist of or are not derived from proteins or peptides fall into this category.

[0019] Functionally characterized transporters for which sequence data are lacking. Transporters of particular physiological significance will be included in this category even though a family assignment cannot be made.

[0020] Putative transporters in which no family member is an established transporter. Putative transport protein families are grouped under this number and will either be classified elsewhere when the transport function of a member becomes established, or will be eliminated from the TC classification system if the proposed transport function is disproven. These families include a member or members for which a transport function has been suggested, but evidence for such a function is not yet compelling.

[0021] Auxiliary transport proteins. Proteins that in some way facilitate transport across one or more biological membranes but do not themselves participate directly in transport are included in this class. These proteins always function in conjunction with one or more transport proteins. They may provide a function connected with energy coupling to transport, play a structural role in complex formation or serve a regulatory function.

[0022] Transporters of unknown classification. Transport protein families of unknown classification are grouped under this number and will be classified elsewhere when the transport process and energy coupling mechanism are characterized. These families include at least one member for which a transport function has been established, but either the mode of transport or the energy coupling mechanism is not known.

[0023] Ion Channels

[0024] An important type of transporter is the ion channel. Ion channels regulate many different cell proliferation, differentiation, and signaling processes by regulating the flow of ions into and out of cells. Ion channels are found in the plasma membranes of virtually every cell in eukaryotic organisms. Ion channels mediate a variety of cellular functions including regulation of membrane potentials and absorption and secretion of ion across epithelial membranes. When present in intracellular membranes of the Golgi apparatus and endocytic vesicles, ion channels, such as chloride channels, also regulate organelle pH. For a review, see Greger, R. (1988) Annu. Rev. Physiol. 50:111-122.

[0025] Ion channels are generally classified by structure and the type of mode of action. For example, extracellular ligand gated channels (ELGs) are comprised of five polypeptide subunits, with each subunit having 4 membrane spanning domains, and are activated by the binding of an extracellular ligand to the channel. In addition, channels are sometimes classified by the ion type that is transported, for example, chlorine channels, potassium channels, etc. There may be many classes of channels for transporting a single type of ion (a detailed review of channel types can be found at Alexander, S. P. H. and J. A. Peters (1997). Receptor and ion channel nomenclature supplement. Trends Pharmacol. Sci., Elsevier, pp. 65-68

[0026] There are many types of ion channels based on structure. For example, many ion channels fall within one of the following groups: extracellular ligand-gated channels (ELG), intracellular ligand-gated channels (ILG), inward rectifying channels (INR), intercellular (gap junction) channels, and voltage gated channels (VIC). There are additionally recognized other channel families based on ion-type transported, cellular location and drug sensitivity. Detailed information on each of these, their activity, ligand type, ion type, disease association, drugability, and other information pertinent to the present invention, is well known in the art.

[0027] Extracellular ligand-gated channels, ELGs, are generally comprised of five polypeptide subunits, Unwin, N. (1993), Cell 72: 31-41; Unwin, N. (1995), Nature 373: 37-43; Hucho, F., et al., (1996) J. Neurochem. 66: 1781-1792; Hucho, F., et al., (1996) Eur. J. Biochem. 239: 539-557; Alexander, S. P. H. and J. A. Peters (1997), Trends Pharmacol. Sci., Elsevier, pp. 4-6; 36-40; 42-44; and Xue, H. (1998) J. Mol. Evol. 47: 323-333. Each subunit has 4 membrane spanning regions: this serves as a means of identifying other members of the ELG family of proteins. ELG bind a ligand and in response modulate the flow of ions. Examples of ELG include most members of the neurotransmitter-receptor family of proteins, e.g., GABAI receptors. Other members of this family of ion channels include glycine receptors, ryandyne receptors, and ligand gated calcium channels.

[0028] The Voltage-gated Ion Channel (VIC) Superfamily

[0029] Proteins of the VIC family are ion-selective channel proteins found in a wide range of bacteria, archaea and eukaryotes Hille, B. (1992), Chapter 9: Structure of channel proteins; Chapter 20: Evolution and diversity. In: Ionic Channels of Excitable Membranes, 2nd Ed., Sinaur Assoc. Inc., Pubs., Sunderland, Mass.; Sigworth, F. J. (1993), Quart. Rev. Biophys. 27: 1-40; Salkoff, L. and T. Jegla (1995), Neuron 15: 489-492; Alexander, S. P. H. et al., (1997), Trends Pharmacol. Sci., Elsevier, pp. 76-84; Jan, L. Y. et al., (1997), Annu. Rev. Neurosci. 20: 91-123; Doyle, D. A, et al., (1998) Science 280: 69-77; Terlau, H. and W. Stüthmer (1998), Naturwissenschaften 85: 437-444. They are often homo- or heterooligomeric structures with several dissimilar subunits (e.g., a1-a2-d-b Ca²⁺ channels, ab₁b₂ Na⁺ channels or (a)₄-b K⁺ channels), but the channel and the primary receptor is usually associated with the a (or a1) subunit. Functionally characterized members are specific for K⁺, Na⁺ or Ca²⁺. The K⁺ channels usually consist of homotetrameric structures with each a-subunit possessing six transmembrane spanners (TMSs). The a1 and a subunits of the Ca²⁺ and Na⁺ channels, respectively, are about four times as large and possess 4 units, each with 6 TMSs separated by a hydrophilic loop, for a total of 24 TMSs. These large channel proteins form heterotetra-unit structures equivalent to the homotetrameric structures of most K⁺ channels. All four units of the Ca²⁺ and Na⁺ channels are homologous to the single unit in the homotetrameric K⁺ channels. Ion flux via the eukaryotic channels is generally controlled by the transmembrane electrical potential (hence the designation, voltage-sensitive) although some are controlled by ligand or receptor binding.

[0030] Several putative K⁺-selective channel proteins of the VIC family have been identified in prokaryotes. The structure of one of them, the KcsA K⁺ channel of Streptomyces lividans, has been solved to 3.2 Å resolution. The protein possesses four identical subunits, each with two transmembrane helices, arranged in the shape of an inverted teepee or cone. The cone cradles the “selectivity filter” P domain in its outer end. The narrow selectivity filter is only 12 Å long, whereas the remainder of the channel is wider and lined with hydrophobic residues. A large water-filled cavity and helix dipoles stabilize K⁺ in the pore. The selectivity filter has two bound K⁺ ions about 7.5 Å apart from each other. Ion conduction is proposed to result from a balance of electrostatic attractive and repulsive forces.

[0031] In eukaryotes, each VIC family channel type has several subtypes based on pharmacological and electrophysiological data. Thus, there are five types of Ca²⁺ channels (L, N, P, Q and T). There are at least ten types of K⁺ channels, each responding in different ways to different stimuli: voltage-sensitive [Ka, Kv, Kvr, Kvs and Ksr], Ca²⁺-sensitive [BK_{Ca}, IK_{Ca} and SK_{Ca}] and receptor-coupled [K_{M} and K_{ACh}]. There are at least six types of Na⁺ channels (I, II, III, μ1, H1 and PN3). Tetrameric channels from both prokaryotic and eukaryotic organisms are known in which each a-subunit possesses 2 TMSs rather than 6, and these two TMSs are homologous to TMSs 5 and 6 of the six TMS unit found in the voltage-sensitive channel proteins. KcsA of S. lividans is an example of such a 2 TMS channel protein. These channels may include the K_{Na}(Na⁺-activated) and K_{Vol} (cell volume-sensitive) K⁺ channels, as well as distantly related channels such as the Tok1 K⁺ channel of yeast, the TWIK-1 inward rectifier K⁺ channel of the mouse and the TREK-1 K⁺ channel of the mouse. Because of insufficient sequence similarity with proteins of the VIC family, inward rectifier K⁺ IRK channels (ATP-regulated; G-protein-activated) which possess a P domain and two flanking TMSs are placed in a distinct family. However, substantial sequence similarity in the P region suggests that they are homologous. The b, g and d subunits of VIC family members, when present, frequently play regulatory roles in channel activation/deactivation.

[0032] The Epithelial Na⁺ Channel (ENaC) Family

[0033] The ENaC family consists of over twenty-four sequenced proteins (Canessa, C. M., et al., (1994), Nature 367: 463-467, Le, T. and M. H. Saier, Jr. (1996), Mol. Membr. Biol. 13: 149-157; Garty, H. and L. G. Palmer (1997), Physiol. Rev. 77: 359-396; Waldmann, R., et al., (1997), Nature 386: 173-177; Darboux, I., et al., (1998), J. Biol. Chem. 273: 9424-9429; Firsov, D., et al., (1998), EMBO J. 17: 344-352; Horisberger, J.-D. (1998). Curr. Opin. Struc. Biol. 10: 443-449). All are from animals with no recognizable homologues in other eukaryotes or bacteria. The vertebrate ENaC proteins from epithelial cells cluster tightly together on the phylogenetic tree: voltage-insensitive ENaC homologues are also found in the brain. Eleven sequenced C. elegans proteins, including the degenerins, are distantly related to the vertebrate proteins as well as to each other. At least some of these proteins form part of a mechano-transducing complex for touch sensitivity. The homologous Helix aspersa (FMRF-amide)-activated Na⁺ channel is the first peptide neurotransmitter-gated ionotropic receptor to be sequenced.

[0034] Protein members of this family all exhibit the same apparent topology, each with N- and C-termini on the inside of the cell, two amphipathic transmembrane spanning segments, and a large extracellular loop. The extracellular domains contain numerous highly conserved cysteine residues. They are proposed to serve a receptor function.

[0035] Mammalian ENaC is important for the maintenance of Na⁺ balance and the regulation of blood pressure. Three homologous ENaC subunits, alpha, beta, and gamma, have been shown to assemble to form the highly Na⁺-selective channel. The stoichiometry of the three subunits is alpha₂, beta1, gamma1 in a heterotetrameric architecture.

[0036] The Glutamate-gated Ion Channel (GIC) Family of Neurotransmitter Receptors

[0037] Members of the GIC family are heteropentameric complexes in which each of the 5 subunits is of 800-1000 amino acyl residues in length (Nakanishi, N., et al, (1990), Neuron 5: 569-581; Unwin, N. (1993), Cell 72: 31-41; Alexander, S. P. H. and J. A. Peters (1997) Trends Pharmacol. Sci., Elsevier, pp. 36-40). These subunits may span the membrane three or five times as putative a-helices with the N-termini (the glutamate-binding domains) localized extracellularly and the C-termini localized cytoplasmically. They may be distantly related to the ligand-gated ion channels, and if so, they may possess substantial b-structure in their transmembrane regions. However, homology between these two families cannot be established on the basis of sequence comparisons alone. The subunits fall into six subfamilies: a, b, g, d, e and z.

[0038] The GIC channels are divided into three types: (1) a-amino-3-hydroxy-5-methyl-4-isoxazole propionate (AMPA)-, (2) kainate- and (3) N-methyl-D-aspartate (NMDA)-selective glutamate receptors. Subunits of the AMPA and kainate classes exhibit 35-40% identity with each other while subunits of the NMDA receptors exhibit 22-24% identity with the former subunits. They possess large N-terminal, extracellular glutamate-binding domains that are homologous to the periplasmic glutamine and glutamate receptors of ABC-type uptake permeases of Gram-negative bacteria. All known members of the GIC family are from animals. The different channel (receptor) types exhibit distinct ion selectivities and conductance properties. The NMDA-selective large conductance channels are highly permeable to monovalent cations and Ca²⁺. The AMPA- and kainate-selective ion channels are permeable primarily to monovalent cations with only low permeability to Ca²⁺.

[0039] The Chloride Channel (ClC) Family

[0040] The ClC family is a large family consisting of dozens of sequenced proteins derived from Gram-negative and Gram-positive bacteria, cyanobacteria, archaea, yeast, plants and animals (Steinmeyer, K., et al., (1991), Nature 354: 301-304; Uchida, S., et al., (1993), J. Biol. Chem. 268: 3821-3824; Huang, M.-E., et al., (1994), J. Mol. Biol. 242: 595-598; Kawasaki, M., et al., (1994), Neuron 12: 597-604; Fisher, W. E., et al., (1995), Genomics. 29:598-606; and Foskett, J. K. (1998), Annu. Rev. Physiol. 60: 689-717). These proteins are essentially ubiquitous, although they are not encoded within genomes of Haemophilus influenzae, Mycoplasma genitalium, and Mycoplasma pneumoniae. Sequenced proteins vary in size from 395 amino acyl residues (M. jannaschii) to 988 residues (man). Several organisms contain multiple ClC family paralogues. For example, Synechocystis has two paralogues, one of 451 residues in length and the other of 899 residues. Arabidopsis thaliana has at least four sequenced paralogues, (775-792 residues), humans also have at least five paralogues (820-988 residues), and C. elegans also has at least five (810-950 residues). There are nine known members in mammals, and mutations in three of the corresponding genes cause human diseases. E. coli, Methanococcus jannaschii and Saccharomyces cerevisiae only have one ClC family member each. With the exception of the larger Synechocystis paralogue, all bacterial proteins are small (395-492 residues) while all eukaryotic proteins are larger (687-988 residues). These proteins exhibit 10-12 putative transmembrane a-helical spanners (TMSs) and appear to be present in the membrane as homodimers. While one member of the family, Torpedo ClC-O, has been reported to have two channels, one per subunit, others are believed to have just one.

[0041] All functionally characterized members of the ClC family transport chloride, some in a voltage-regulated process. These channels serve a variety of physiological functions (cell volume regulation; membrane potential stabilization; signal transduction; transepithelial transport, etc.). Different homologues in humans exhibit differing anion selectivities, i.e., ClC4 and ClC5 share a NO₃⁻>Cl⁻>Br⁻>I⁻ conductance sequence, while ClC3 has an I⁻>Cl⁻ selectivity. The ClC4 and ClC5 channels and others exhibit outward rectifying currents with currents only at voltages more positive than +20 mV.

[0042] Animal Inward Rectifier K⁺ Channel (IRK-C) Family

[0043] IRK channels possess the “minimal channel-forming structure” with only a P domain, characteristic of the channel proteins of the VIC family, and two flanking transmembrane spanners (Shuck, M. E., et al., (1994), J. Biol. Chem. 269: 24261-24270; Ashen, M. D., et al., (1995), Am. J. Physiol. 268: H506-H511; Salkoff, L. and T. Jegla (1995), Neuron 15: 489-492; Aguilar-Bryan, L., et al., (1998), Physiol. Rev. 78: 227-245; Ruknudin, A., et al., (1998), J. Biol. Chem. 273: 14165-14171). They may exist in the membrane as homo- or heterooligomers. They have a greater tendency to let K⁺ flow into the cell than out. Voltage-dependence may be regulated by external K⁺, by internal Mg²⁺, by internal ATP and/or by G-proteins. The P domains of IRK channels exhibit limited sequence similarity to those of the VIC family, but this sequence similarity is insufficient to establish homology. Inward rectifiers play a role in setting cellular membrane potentials, and the closing of these channels upon depolarization permits the occurrence of long duration action potentials with a plateau phase. Inward rectifiers lack the intrinsic voltage sensing helices found in VIC family channels. In a few cases, those of Kir1.1a and Kir6.2, for example, direct interaction with a member of the ABC superfamily has been proposed to confer unique functional and regulatory properties to the heteromeric complex, including sensitivity to ATP. The SUR1 sulfonylurea receptor (spQ09428) is the ABC protein that regulates the Kir6.2 channel in response to ATP, and CFTR may regulate Kir1.1a. Mutations in SUR1 are the cause of familial persistent hyperinsulinemic hypoglycemia in infancy (PHHI), an autosomal recessive disorder characterized by unregulated insulin secretion in the pancreas.

[0044] ATP-gated Cation Channel (ACC) Family

[0045] Members of the ACC family (also called P2X receptors) respond to ATP, a functional neurotransmitter released by exocytosis from many types of neurons (North, R. A. (1996), Curr. Opin. Cell Biol. 8: 474-483; Soto, F., M. Garcia-Guzman and W. Stühmer (1997), J. Membr. Biol. 160: 91-100). They have been placed into seven groups (P2X₁-P2X₇) based on their pharmacological properties. These channels, which function at neuron-neuron and neuron-smooth muscle junctions, may play roles in the control of blood pressure and pain sensation. They may also function in lymphocyte and platelet physiology. They are found only in animals.

[0046] The proteins of the ACC family are quite similar in sequence (>35% identity), but they possess 380-1000 amino acyl residues per subunit with variability in length localized primarily to the C-terminal domains. They possess two transmembrane spanners, one about 30-50 residues from their N-termini, the other near residues 320-340. The extracellular receptor domains between these two spanners (of about 270 residues) are well conserved with numerous conserved glycyl and cysteyl residues. The hydrophilic C-termini vary in length from 25 to 240 residues. They resemble the topologically similar epithelial Na⁺ channel (ENaC) proteins in possessing (a) N- and C-termini localized intracellularly, (b) two putative transmembrane spanners, (c) a large extracellular loop domain, and (d) many conserved extracellular cysteyl residues. ACC family members are, however, not demonstrably homologous with them. ACC channels are probably hetero- or homomultimers and transport small monovalent cations (Me⁺). Some also transport Ca²⁺; a few also transport small metabolites.

[0047] The Ryanodine-Inositol 1,4,5-triphosphate Receptor Ca²⁺ Channel (RIR-CaC) Family

[0048] Ryanodine (Ry)-sensitive and inositol 1,4,5-triphosphate (IP3)-sensitive Ca²⁺-release channels function in the release of Ca²⁺ from intracellular storage sites in animal cells and thereby regulate various Ca²⁺-dependent physiological processes (Hasan, G. et al., (1992) Development 116: 967-975; Michikawa, T., et al., (1994), J. Biol. Chem. 269: 9184-9189; Tunwell, R. E. A., (1996), Biochem. J. 318: 477-487; Lee, A. G. (1996) Biomembranes, Vol. 6, Transmembrane Receptors and Channels (A. G. Lee, ed.), JAI Press, Denver, Colo., pp 291-326; Mikoshiba, K., et al., (1996) J. Biochem. Biomem. 6: 273-289). Ry receptors occur primarily in muscle cell sarcoplasmic reticular (SR) membranes, and IP3 receptors occur primarily in brain cell endoplasmic reticular (ER) membranes where they effect release of Ca²⁺ into the cytoplasm upon activation (opening) of the channel.

[0049] The Ry receptors are activated as a result of the activity of dihydropyridine-sensitive Ca²⁺ channels. The latter are members of the voltage-sensitive ion channel (VIC) family. Dihydropyridine-sensitive channels are present in the T-tubular systems of muscle tissues.

[0050] Ry receptors are homotetrameric complexes with each subunit exhibiting a molecular size of over 500,000 daltons (about 5,000 amino acyl residues). They possess C-terminal domains with six putative transmembrane a-helical spanners (TMSs). Putative pore-forming sequences occur between the fifth and sixth TMSs as suggested for members of the VIC family. The large N-terminal hydrophilic domains and the small C-terminal hydrophilic domains are localized to the cytoplasm. Low resolution 3-dimensional structural data are available. Mammals possess at least three isoforms that probably arose by gene duplication and divergence before divergence of the mammalian species. Homologues are present in humans and Caenorabditis elegans.

[0051] IP₃ receptors resemble Ry receptors in many respects. (1) They are homotetrameric complexes with each subunit exhibiting a molecular size of over 300,000 daltons (about 2,700 amino acyl residues). (2) They possess C-terminal channel domains that are homologous to those of the Ry receptors. (3) The channel domains possess six putative TMSs and a putative channel lining region between TMSs 5 and 6. (4) Both the large N-terminal domains and the smaller C-terminal tails face the cytoplasm. (5) They possess covalently linked carbohydrate on extracytoplasmic loops of the channel domains. (6) They have three currently recognized isoforms (types 1, 2, and 3) in mammals which are subject to differential regulation and have different tissue distributions.

[0052] IP₃ receptors possess three domains: N-terminal IP₃-binding domains, central coupling or regulatory domains and C-terminal channel domains. Channels are activated by IP₃ binding, and like the Ry receptors, the activities of the IP₃ receptor channels are regulated by phosphorylation of the regulatory domains, catalyzed by various protein kinases. They predominate in the endoplasmic reticular membranes of various cell types in the brain but have also been found in the plasma membranes of some nerve cells derived from a variety of tissues.

[0053] The channel domains of the Ry and IP₃ receptors comprise a coherent family that in spite of apparent structural similarities, do not show appreciable sequence similarity of the proteins of the VIC family. The Ry receptors and the IP₃ receptors cluster separately on the RIR-CaC family tree. They both have homologues in Drosophila. Based on the phylogenetic tree for the family, the family probably evolved in the following sequence: (1) A gene duplication event occurred that gave rise to Ry and IP₃ receptors in invertebrates. (2) Vertebrates evolved from invertebrates. (3) The three isoforms of each receptor arose as a result of two distinct gene duplication events. (4) These isoforms were transmitted to mammals before divergence of the mammalian species.

[0054] The Organellar Chloride Channel (O-ClC) Family

[0055] Proteins of the O-ClC family are voltage-sensitive chloride channels found in intracellular membranes but not the plasma membranes of animal cells (Landry, D, et al., (1993), J. Biol. Chem. 268: 14948-14955; Valenzuela, Set al., (1997), J. Biol. Chem. 272: 12575-12582; and Duncan, R. R., et al., (1997), J. Biol. Chem. 272: 23880-23886).

[0056] They are found in human nuclear membranes, and the bovine protein targets to the microsomes, but not the plasma membrane, when expressed in Xenopus laevis oocytes. These proteins are thought to function in the regulation of the membrane potential and in transepithelial ion absorption and secretion in the kidney. They possess two putative transmembrane a-helical spanners (TMSs) with cytoplasmic N- and C-termini and a large luminal loop that may be glycosylated. The bovine protein is 437 amino acyl residues in length and has the two putative TMSs at positions 223-239 and 367-385. The human nuclear protein is much smaller (241 residues). A C. elegans homologue is 260 residues long.

[0057] Phospholipid-Transporting ATPases

[0058] The protein provided by the present invention is a novel human ATPase, specifically a phospholipid-transporting ATPase, and more specifically, a P-type, class I ATPase. Phospholipid-transporting ATPases, also referred to as aminophospholipid transporters or aminophospholipid translocases, transport phospholipids, such as phosphatidylserine and phosphatidylethanolamine, from one side of a lipid bilayer to the other side. Phospholipids are dual-solubility, amphipathic molecules, meaning that one end of the molecule is nonpolar and hydrophobic and the other end is polar and hydrophilic. In phospholipids, the nonpolar/hydrophobic end of the molecule is comprised of hydrocarbon chains and the polar/hydrophilic end is comprised of a phosphate group. Phospholipids are the primary lipids of biological membranes, and provide the majority of the lipid bilayer structure of biological membranes. Furthermore, many phospholipids, such as phosphatidyl inositol, play significant functional roles in signaling across membranes. The importance of biological membranes, particularly lipid bilayers, is well established. Lipid bilayers are a necessary component of cells, and defective lipid bilayers may lead to a wide variety of disorders, that may affect nearly all cells and tissues of the human body, thereby contributing to numerous disorders of wide-ranging scope. Consequently, it is valuable to identify novel human phospholipid-transporting ATPase proteins. Such ATPase proteins, and encoding genes, are critical for the maintenance of lipid bilayers, and therefore are useful as, for example, targets for developing diagnostic reagents or pharmaceutical/therapeutic agents for diseases associated with defective lipid bilayers, particularly diseases associated with defective phospholipid transport across lipid bilayers. Such defective lipid bilayers may be characterized by, for example, defective lipid bilayer structure or defective signaling across the lipid bilayer due to defective phospholipid-transporting ATPase function. For a further review of phospholipid-transporting ATPases, see Halleck et al., Physiol Genomics 1999 Nov. 11;1(3):139-50.

[0059] Transporter proteins, particularly members of the ATPase subfamily, are a major target for drug action and development. Accordingly, it is valuable to the field of pharmaceutical development to identify and characterize previously unknown transport proteins. The present invention advances the state of the art by providing previously unidentified human transport proteins.

### SUMMARY OF THE INVENTION

[0060] The present invention is based in part on the identification of amino acid sequences of human transporter peptides and proteins that are related to the ATPase transporter subfamily, as well as allelic variants and other mammalian orthologs thereof. These unique peptide sequences, and nucleic acid sequences that encode these peptides, can be used as models for the development of human therapeutic targets, aid in the identification of therapeutic proteins, and serve as targets for the development of human therapeutic agents that modulate transporter activity in cells and tissues that express the transporter. Experimental data as provided in FIG. 1 indicates expression in humans in the normal testis, lung carcinoid, pooled germ cell tumors and mixed tissue.

### DESCRIPTION OF THE FIGURE SHEETS

[0061] FIG. 1 provides the nucleotide sequence of a cDNA molecule sequence that encodes the transporter protein of the present invention. (SEQ ID NO:1) In addition structure and functional information is provided, such as ATG start, stop and tissue distribution, where available, that allows one to readily determine specific uses of inventions based on this molecular sequence. Experimental data as provided in FIG. 1 indicates expression in humans in the normal testis, lung carcinoid, pooled germ cell tumors and mixed tissue.

[0062] FIG. 2 provides the predicted amino acid sequence of the transporter of the present invention. (SEQ ID NO:2) In addition structure and functional information such as protein family, function, and modification sites is provided where available, allowing one to readily determine specific uses of inventions based on this molecular sequence.

[0063] FIG. 3 provides genomic sequences that span the gene encoding the transporter protein of the present invention. (SEQ ID NO:3) In addition structure and functional information, such as intron/exon structure, promoter location, etc., is provided where available, allowing one to readily determine specific uses of inventions based on this molecular sequence.

### DETAILED DESCRIPTION OF THE INVENTION

[0064] General Description

[0065] The present invention is based on the sequencing of the human genome. During the sequencing and assembly of the human genome, analysis of the sequence information revealed previously unidentified fragments of the human genome that encode peptides that share structural and/or sequence homology to protein/peptide/domains identified and characterized within the art as being a transporter protein or part of a transporter protein and are related to the ATPase transporter subfamily. Utilizing these sequences, additional genomic sequences were assembled and transcript and/or cDNA sequences were isolated and characterized. Based on this analysis, the present invention provides amino acid sequences of human transporter peptides and proteins that are related to the ATPase transporter subfamily, nucleic acid sequences in the form of transcript sequences, cDNA sequences and/or genomic sequences that encode these transporter peptides and proteins, nucleic acid variation (allelic information), tissue distribution of expression, and information about the closest art known protein/peptide/domain that has structural or sequence homology to the transporter of the present invention.

[0066] In addition to being previously unknown, the peptides that are provided in the present invention are selected based on their ability to be used for the development of commercially important products and services. Specifically, the present peptides are selected based on homology and/or structural relatedness to known transporter proteins of the ATPase transporter subfamily and the expression pattern observed. Experimental data as provided in FIG. 1 indicates expression in humans in the normal testis, lung carcinoid, pooled germ cell tumors and mixed tissue. The art has clearly established the commercial importance of members of this family of proteins and proteins that have expression patterns similar to that of the present gene. Some of the more specific features of the peptides of the present invention, and the uses thereof, are described herein, particularly in the Background of the Invention and in the annotation provided in the Figures, and/or are known within the art for each of the known ATPase family or subfamily of transporter proteins.

### Specific Embodiments

[0067] Peptide Molecules

[0068] The present invention provides nucleic acid sequences that encode protein molecules that have been identified as being members of the transporter family of proteins and are related to the ATPase transporter subfamily (protein sequences are provided in FIG. 2, transcript/cDNA sequences are provided in FIGS. 1 and genomic sequences are provided in FIG. 3). The peptide sequences provided in FIG. 2, as well as the obvious variants described herein, particularly allelic variants as identified herein and using the information in FIG. 3, will be referred herein as the transporter peptides of the present invention, transporter peptides, or peptides/proteins of the present invention.

[0069] The present invention provides isolated peptide and protein molecules that consist of, consist essentially of, or comprising the amino acid sequences of the transporter peptides disclosed in the FIG. 2, (encoded by the nucleic acid molecule shown in FIG. 1, transcript/cDNA or FIG. 3, genomic sequence), as well as all obvious variants of these peptides that are within the art to make and use. Some of these variants are described in detail below.

[0070] As used herein, a peptide is said to be “isolated” or “purified” when it is substantially free of cellular material or free of chemical precursors or other chemicals. The peptides of the present invention can be purified to homogeneity or other degrees of purity. The level of purification will be based on the intended use. The critical feature is that the preparation allows for the desired function of the peptide, even if in the presence of considerable amounts of other components (the features of an isolated nucleic acid molecule is discussed below).

[0071] In some uses, “substantially free of cellular material” includes preparations of the peptide having less than about 30% (by dry weight) other proteins (i.e., contaminating protein), less than about 20% other proteins, less than about 10% other proteins, or less than about 5% other proteins. When the peptide is recombinantly produced, it can also be substantially free of culture medium, i.e., culture medium represents less than about 20% of the volume of the protein preparation.

[0072] The language “substantially free of chemical precursors or other chemicals” includes preparations of the peptide in which it is separated from chemical precursors or other chemicals that are involved in its synthesis. In one embodiment, the language “substantially free of chemical precursors or other chemicals” includes preparations of the transporter peptide having less than about 30% (by dry weight) chemical precursors or other chemicals, less than about 20% chemical precursors or other chemicals, less than about 10% chemical precursors or other chemicals, or less than about 5% chemical precursors or other chemicals.

[0073] The isolated transporter peptide can be purified from cells that naturally express it, purified from cells that have been altered to express it (recombinant), or synthesized using known protein synthesis methods. Experimental data as provided in FIG. 1 indicates expression in humans in the normal testis, lung carcinoid, pooled germ cell tumors and mixed tissue. For example, a nucleic acid molecule encoding the transporter peptide is cloned into an expression vector, the expression vector introduced into a host cell and the protein expressed in the host cell. The protein can then be isolated from the cells by an appropriate purification scheme using standard protein purification techniques. Many of these techniques are described in detail below.

[0074] Accordingly, the present invention provides proteins that consist of the amino acid sequences provided in FIG. 2 (SEQ ID NO:2), for example, proteins encoded by the transcript/cDNA nucleic acid sequences shown in FIG. 1 (SEQ ID NO:1) and the genomic sequences provided in FIG. 3 (SEQ ID NO:3). The amino acid sequence of such a protein is provided in FIG. 2. A protein consists of an amino acid sequence when the amino acid sequence is the final amino acid sequence of the protein.

[0075] The present invention further provides proteins that consist essentially of the amino acid sequences provided in FIG. 2 (SEQ ID NO:2), for example, proteins encoded by the transcript/cDNA nucleic acid sequences shown in FIG. 1 (SEQ ID NO:1) and the genomic sequences provided in FIG. 3 (SEQ ID NO:3). A protein consists essentially of an amino acid sequence when such an amino acid sequence is present with only a few additional amino acid residues, for example from about 1 to about 100 or so additional residues, typically from 1 to about 20 additional residues in the final protein.

[0076] The present invention further provides proteins that comprise the amino acid sequences provided in FIG. 2 (SEQ ID NO:2), for example, proteins encoded by the transcript/cDNA nucleic acid sequences shown in FIG. 1 (SEQ ID NO:1) and the genomic sequences provided in FIG. 3 (SEQ ID NO:3). A protein comprises an amino acid sequence when the amino acid sequence is at least part of the final amino acid sequence of the protein. In such a fashion, the protein can be only the peptide or have additional amino acid molecules, such as amino acid residues (contiguous encoded sequence) that are naturally associated with it or heterologous amino acid residues/peptide sequences. Such a protein can have a few additional amino acid residues or can comprise several hundred or more additional amino acids. The preferred classes of proteins that are comprised of the transporter peptides of the present invention are the naturally occurring mature proteins. A brief description of how various types of these proteins can be made/isolated is provided below.

[0077] The transporter peptides of the present invention can be attached to heterologous sequences to form chimeric or fusion proteins. Such chimeric and fusion proteins comprise a transporter peptide operatively linked to a heterologous protein having an amino acid sequence not substantially homologous to the transporter peptide. “Operatively linked” indicates that the transporter peptide and the heterologous protein are fused in-frame. The heterologous protein can be fused to the N-terminus or C-terminus of the transporter peptide.

[0078] In some uses, the fusion protein does not affect the activity of the transporter peptide per se. For example, the fusion protein can include, but is not limited to, enzymatic fusion proteins, for example beta-galactosidase fusions, yeast two-hybrid GAL fusions, poly-His fusions, MYC-tagged, HI-tagged and Ig fusions. Such fusion proteins, particularly poly-His fusions, can facilitate the purification of recombinant transporter peptide. In certain host cells (e.g., mammalian host cells), expression and/or secretion of a protein can be increased by using a heterologous signal sequence.

[0079] A chimeric or fusion protein can be produced by standard recombinant DNA techniques. For example, DNA fragments coding for the different protein sequences are ligated together in-frame in accordance with conventional techniques. In another embodiment, the fusion gene can be synthesized by conventional techniques including automated DNA synthesizers. Alternatively, PCR amplification of gene fragments can be carried out using anchor primers which give rise to complementary overhangs between two consecutive gene fragments which can subsequently be annealed and re-amplified to generate a chimeric gene sequence (see Ausubel et al., Current Protocols in Molecular Biology, 1992). Moreover, many expression vectors are commercially available that already encode a fusion moiety (e.g., a GST protein). A transporter peptide-encoding nucleic acid can be cloned into such an expression vector such that the fusion moiety is linked in-frame to the transporter peptide.

[0080] As mentioned above, the present invention also provides and enables obvious variants of the amino acid sequence of the proteins of the present invention, such as naturally occurring mature forms of the peptide, allelic/sequence variants of the peptides, non-naturally occurring recombinantly derived variants of the peptides, and orthologs and paralogs of the peptides. Such variants can readily be generated using art-known techniques in the fields of recombinant nucleic acid technology and protein biochemistry. It is understood, however, that variants exclude any amino acid sequences disclosed prior to the invention.

[0081] Such variants can readily be identified/made using molecular techniques and the sequence information disclosed herein. Further, such variants can readily be distinguished from other peptides based on sequence and/or structural homology to the transporter peptides of the present invention. The degree of homology/identity present will be based primarily on whether the peptide is a functional variant or non-functional variant, the amount of divergence present in the paralog family and the evolutionary distance between the orthologs.

[0082] To determine the percent identity of two amino acid sequences or two nucleic acid sequences, the sequences are aligned for optimal comparison purposes (e.g., gaps can be introduced in one or both of a first and a second amino acid or nucleic acid sequence for optimal alignment and non-homologous sequences can be disregarded for comparison purposes). In a preferred embodiment, at least 30%, 40%, 50%, 60%, 70%, 80%, or 90% or more of a reference sequence is aligned for comparison purposes. The amino acid residues or nucleotides at corresponding amino acid positions or nucleotide positions are then compared. When a position in the first sequence is occupied by the same amino acid residue or nucleotide as the corresponding position in the second sequence, then the molecules are identical at that position (as used herein amino acid or nucleic acid “identity” is equivalent to amino acid or nucleic acid “homology”). The percent identity between the two sequences is a function of the number of identical positions shared by the sequences, taking into account the number of gaps, and the length of each gap, which need to be introduced for optimal alignment of the two sequences.

[0083] The comparison of sequences and determination of percent identity and similarity between two sequences can be accomplished using a mathematical algorithm. (Computational Molecular Biology, Lesk, A. M., ed., Oxford University Press, New York, 1988; Biocomputing: Informatics and Genome Projects, Smith, D. W., ed., Academic Press, New York, 1993; Computer Analysis of Sequence Data, Part 1, Griffin, A. M., and Griffin, H. G., eds., Humana Press, New Jersey, 1994; Sequence Analysis in Molecular Biology, von Heinje, G., Academic Press, 1987; and Sequence Analysis Primer, Gribskov, M. and Devereux, J., eds., M Stockton Press, New York, 1991). In a preferred embodiment, the percent identity between two amino acid sequences is determined using the Needleman and Wunsch (J. Mol. Biol. (48):444-453 (1970)) algorithm which has been incorporated into the GAP program in the GCG software package (available at http://www.gcg.com), using either a Blossom 62 matrix or a PAM250 matrix, and a gap weight of 16, 14, 12, 10, 8, 6, or 4 and a length weight of 1, 2, 3, 4, 5, or 6. In yet another preferred embodiment, the percent identity between two nucleotide sequences is determined using the GAP program in the GCG software package (Devereux, J., et al., Nucleic Acids Res. 12(1):387 (1984)) (available at http://www.gcg.com), using a NWSgapdna.CMP matrix and a gap weight of 40, 50, 60, 70, or 80 and a length weight of 1, 2, 3, 4, 5, or 6. In another embodiment, the percent identity between two amino acid or nucleotide sequences is determined using the algorithm of E. Myers and W. Miller (CABIOS, 4:11-17 (1989)) which has been incorporated into the ALIGN program (version 2.0), using a PAM120 weight residue table, a gap length penalty of 12 and a gap penalty of 4.

[0084] The nucleic acid and protein sequences of the present invention can further be used as a “query sequence” to perform a search against sequence databases to, for example, identify other family members or related sequences. Such searches can be performed using the NBLAST and XBLAST programs (version 2.0) of Altschul, et al. (J. Mol. Biol. 215:403-10 (1990)). BLAST nucleotide searches can be performed with the NBLAST program, score=100, wordlength=12 to obtain nucleotide sequences homologous to the nucleic acid molecules of the invention. BLAST protein searches can be performed with the XBLAST program, score=50, wordlength=3 to obtain amino acid sequences homologous to the proteins of the invention. To obtain gapped alignments for comparison purposes, Gapped BLAST can be utilized as described in Altschul et al. (Nucleic Acids Res. 25(17):3389-3402 (1997)). When utilizing BLAST and gapped BLAST programs, the default parameters of the respective programs (e.g., XBLAST and NBLAST) can be used.

[0085] Full-length pre-processed forms, as well as mature processed forms, of proteins that comprise one of the peptides of the present invention can readily be identified as having complete sequence identity to one of the transporter peptides of the present invention as well as being encoded by the same genetic locus as the transporter peptide provided herein. As indicated by the data presented in FIG. 3, the map position was determined to be on chromosome 13 by ePCR.

[0086] Allelic variants of a transporter peptide can readily be identified as being a human protein having a high degree (significant) of sequence homology/identity to at least a portion of the transporter peptide as well as being encoded by the same genetic locus as the transporter peptide provided herein. Genetic locus can readily be determined based on the genomic information provided in FIG. 3, such as the genomic sequence mapped to the reference human. As indicated by the data presented in FIG. 3, the map position was determined to be on chromosome 13 by ePCR. As used herein, two proteins (or a region of the proteins) have significant homology when the amino acid sequences are typically at least about 70-80%, 80-90%, and more typically at least about 90-95% or more homologous. A significantly homologous amino acid sequence, according to the present invention, will be encoded by a nucleic acid sequence that will hybridize to a transporter peptide encoding nucleic acid molecule under stringent conditions as more fully described below.

[0087] Paralogs of a transporter peptide can readily be identified as having some degree of significant sequence homology/identity to at least a portion of the transporter peptide, as being encoded by a gene from humans, and as having similar activity or function. Two proteins will typically be considered paralogs when the amino acid sequences are typically at least about 60% or greater, and more typically at least about 70% or greater homology through a given region or domain. Such paralogs will be encoded by a nucleic acid sequence that will hybridize to a transporter peptide encoding nucleic acid molecule under moderate to stringent conditions as more fully described below.

[0088] Orthologs of a transporter peptide can readily be identified as having some degree of significant sequence homology/identity to at least a portion of the transporter peptide as well as being encoded by a gene from another organism. Preferred orthologs will be isolated from mammals, preferably primates, for the development of human therapeutic targets and agents. Such orthologs will be encoded by a nucleic acid sequence that will hybridize to a transporter peptide encoding nucleic acid molecule under moderate to stringent conditions, as more fully described below, depending on the degree of relatedness of the two organisms yielding the proteins.

[0089] Non-naturally occurring variants of the transporter peptides of the present invention can readily be generated using recombinant techniques. Such variants include, but are not limited to deletions, additions and substitutions in the amino acid sequence of the transporter peptide. For example, one class of substitutions are conserved amino acid substitution. Such substitutions are those that substitute a given amino acid in a transporter peptide by another amino acid of like characteristics. Typically seen as conservative substitutions are the replacements, one for another, among the aliphatic amino acids Ala, Val, Leu, and Ile; interchange of the hydroxyl residues Ser and Thr; exchange of the acidic residues Asp and Glu; substitution between the amide residues Asn and Gln; exchange of the basic residues Lys and Arg; and replacements among the aromatic residues Phe and Tyr. Guidance concerning which amino acid changes are likely to be phenotypically silent are found in Bowie et al., Science 247:1306-1310 (1990).

[0090] Variant transporter peptides can be fully functional or can lack function in one or more activities, e.g. ability to bind ligand, ability to transport ligand, ability to mediate signaling, etc. Fully functional variants typically contain only conservative variation or variation in non-critical residues or in non-critical regions. FIG. 2 provides the result of protein analysis and can be used to identify critical domains/regions. Functional variants can also contain substitution of similar amino acids that result in no change or an insignificant change in function. Alternatively, such substitutions may positively or negatively affect function to some degree.

[0091] Non-functional variants typically contain one or more non-conservative amino acid substitutions, deletions, insertions, inversions, or truncation or a substitution, insertion, inversion, or deletion in a critical residue or critical region.

[0092] Amino acids that are essential for function can be identified by methods known in the art, such as site-directed mutagenesis or alanine-scanning mutagenesis (Cunningham et al., Science 244:1081-1085 (1989)), particularly using the results provided in FIG. 2. The latter procedure introduces single alanine mutations at every residue in the molecule. The resulting mutant molecules are then tested for biological activity such as transporter activity or in assays such as an in vitro proliferative activity. Sites that are critical for binding partner/substrate binding can also be determined by structural analysis such as crystallization, nuclear magnetic resonance or photoaffinity labeling (Smith et al., J. Mol. Biol. 224:899-904 (1992); de Vos et al. Science 255:306-312 (1992)).

[0093] The present invention further provides fragments of the transporter peptides, in addition to proteins and peptides that comprise and consist of such fragments, particularly those comprising the residues identified in FIG. 2. The fragments to which the invention pertains, however, are not to be construed as encompassing fragments that may be disclosed publicly prior to the present invention.

[0094] As used herein, a fragment comprises at least 8, 10, 12, 14, 16, or more contiguous amino acid residues from a transporter peptide. Such fragments can be chosen based on the ability to retain one or more of the biological activities of the transporter peptide or could be chosen for the ability to perform a function, e.g. bind a substrate or act as an immunogen. Particularly important fragments are biologically active fragments, peptides that are, for example, about 8 or more amino acids in length. Such fragments will typically comprise a domain or motif of the transporter peptide, e.g., active site, a transmembrane domain or a substrate-binding domain. Further, possible fragments include, but are not limited to, domain or motif containing fragments, soluble peptide fragments, and fragments containing immunogenic structures. Predicted domains and functional sites are readily identifiable by computer programs well known and readily available to those of skill in the art (e.g., PROSITE analysis). The results of one such analysis are provided in FIG. 2.

[0095] Polypeptides often contain amino acids other than the 20 amino acids commonly referred to as the 20 naturally occurring amino acids. Further, many amino acids, including the terminal amino acids, may be modified by natural processes, such as processing and other post-translational modifications, or by chemical modification techniques well known in the art. Common modifications that occur naturally in transporter peptides are described in basic texts, detailed monographs, and the research literature, and they are well known to those of skill in the art (some of these features are identified in FIG. 2).

[0096] Known modifications include, but are not limited to, acetylation, acylation, ADP-ribosylation, amidation, covalent attachment of flavin, covalent attachment of a heme moiety, covalent attachment of a nucleotide or nucleotide derivative, covalent attachment of a lipid or lipid derivative, covalent attachment of phosphotidylinositol, cross-linking, cyclization, disulfide bond formation, demethylation, formation of covalent crosslinks, formation of cystine, formation of pyroglutamate, formylation, gamma carboxylation, glycosylation, GPI anchor formation, hydroxylation, iodination, methylation, myristoylation, oxidation, proteolytic processing, phosphorylation, prenylation, racemization, selenoylation, sulfation, transfer-RNA mediated addition of amino acids to proteins such as arginylation, and ubiquitination.

[0097] Such modifications are well known to those of skill in the art and have been described in great detail in the scientific literature. Several particularly common modifications, glycosylation, lipid attachment, sulfation, gamma-carboxylation of glutamic acid residues, hydroxylation and ADP-ribosylation, for instance, are described in most basic texts, such as Proteins-Structure and Molecular Properties, 2nd Ed., T. E. Creighton, W. H. Freeman and Company, New York (1993). Many detailed reviews are available on this subject, such as by Wold, F., Posttranslational Covalent Modification of Proteins, B. C. Johnson, Ed., Academic Press, New York 1-12 (1983); Seifter et al. (Meth. Enzymol. 182: 626-646 (1990)) and Rattan et al. (Ann. N.Y. Acad. Sci. 663:48-62 (1992)).

[0098] Accordingly, the transporter peptides of the present invention also encompass derivatives or analogs in which a substituted amino acid residue is not one encoded by the genetic code, in which a substituent group is included, in which the mature transporter peptide is fused with another compound, such as a compound to increase the half-life of the transporter peptide (for example, polyethylene glycol), or in which the additional amino acids are fused to the mature transporter peptide, such as a leader or secretory sequence or a sequence for purification of the mature transporter peptide or a pro-protein sequence.

[0099] Protein/Peptide Uses

[0100] The proteins of the present invention can be used in substantial and specific assays related to the functional information provided in the Figures; to raise antibodies or to elicit another immune response; as a reagent (including the labeled reagent) in assays designed to quantitatively determine levels of the protein (or its binding partner or ligand) in biological fluids; and as markers for tissues in which the corresponding protein is preferentially expressed (either constitutively or at a particular stage of tissue differentiation or development or in a disease state). Where the protein binds or potentially binds to another protein or ligand (such as, for example, in a transporter-effector protein interaction or transporter-ligand interaction), the protein can be used to identify the binding partner/ligand so as to develop a system to identify inhibitors of the binding interaction. Any or all of these uses are capable of being developed into reagent grade or kit format for commercialization as commercial products.

[0101] Methods for performing the uses listed above are well known to those skilled in the art. References disclosing such methods include “Molecular Cloning: A Laboratory Manual”, 2d ed., Cold Spring Harbor Laboratory Press, Sambrook, J., E. F. Fritsch and T. Maniatis eds., 1989, and “Methods in Enzymology: Guide to Molecular Cloning Techniques”, Academic Press, Berger, S. L. and A. R. Kimmel eds., 1987.

[0102] The potential uses of the peptides of the present invention are based primarily on the source of the protein as well as the class/action of the protein. For example, transporters isolated from humans and their human/mammalian orthologs serve as targets for identifying agents for use in mammalian therapeutic applications, e.g. a human drug, particularly in modulating a biological or pathological response in a cell or tissue that expresses the transporter. Experimental data as provided in FIG. 1 indicates that transporter proteins of the present invention are expressed in humans in the the normal testis, lung carcinoid, pooled germ cell tumors detected by virtual northern blots. In addition, In addition, PCR-based tissue screening panels indicate expression in mixed tissue. A large percentage of pharmaceutical agents are being developed that modulate the activity of transporter proteins, particularly members of the ATPase subfamily (see Background of the Invention). The structural and functional information provided in the Background and Figures provide specific and substantial uses for the molecules of the present invention, particularly in combination with the expression information provided in FIG. 1. Experimental data as provided in FIG. 1 indicates expression in humans in the normal testis, lung carcinoid, pooled germ cell tumors and mixed tissue. Such uses can readily be determined using the information provided herein, that known in the art and routine experimentation.

[0103] The proteins of the present invention (including variants and fragments that may have been disclosed prior to the present invention) are useful for biological assays related to transporters that are related to members of the ATPase subfamily. Such assays involve any of the known transporter functions or activities or properties useful for diagnosis and treatment of transporter-related conditions that are specific for the subfamily of transporters that the one of the present invention belongs to, particularly in cells and tissues that express the transporter. Experimental data as provided in FIG. 1 indicates that transporter proteins of the present invention are expressed in humans in the the normal testis, lung carcinoid, pooled germ cell tumors detected by virtual northern blots. In addition, In addition, PCR-based tissue screening panels indicate expression in mixed tissue. The proteins of the present invention are also useful in drug screening assays, in cell-based or cell-free systems ((Hodgson, Bio/technology, 1992, Sep. 10(9);973-80). Cell-based systems can be native, i.e., cells that normally express the transporter, as a biopsy or expanded in cell culture. Experimental data as provided in FIG. 1 indicates expression in humans in the normal testis, lung carcinoid, pooled germ cell tumors and mixed tissue. In an alternate embodiment, cell-based assays involve recombinant host cells expressing the transporter protein.

[0104] The polypeptides can be used to identify compounds that modulate transporter activity of the protein in its natural state or an altered form that causes a specific disease or pathology associated with the transporter. Both the transporters of the present invention and appropriate variants and fragments can be used in high-throughput screens to assay candidate compounds for the ability to bind to the transporter. These compounds can be further screened against a functional transporter to determine the effect of the compound on the transporter activity. Further, these compounds can be tested in animal or invertebrate systems to determine activity/effectiveness. Compounds can be identified that activate (agonist) or inactivate (antagonist) the transporter to a desired degree.

[0105] Further, the proteins of the present invention can be used to screen a compound for the ability to stimulate or inhibit interaction between the transporter protein and a molecule that normally interacts with the transporter protein, e.g. a substrate or a component of the signal pathway that the transporter protein normally interacts (for example, another transporter). Such assays typically include the steps of combining the transporter protein with a candidate compound under conditions that allow the transporter protein, or fragment, to interact with the target molecule, and to detect the formation of a complex between the protein and the target or to detect the biochemical consequence of the interaction with the transporter protein and the target, such as any of the associated effects of signal transduction such as changes in membrane potential, protein phosphorylation, cAMP turnover, and adenylate cyclase activation, etc.

[0106] Candidate compounds include, for example, 1) peptides such as soluble peptides, including Ig-tailed fusion peptides and members of random peptide libraries (see, e.g., Lam et al., Nature 354:82-84 (1991); Houghten et al, Nature 354:84-86 (1991)) and combinatorial chemistry-derived molecular libraries made of D- and/or L- configuration amino acids; 2) phosphopeptides (e.g., members of random and partially degenerate, directed phosphopeptide libraries, see, e.g., Songyang et al., Cell 72:767-778 (1993)); 3) antibodies (e.g., polyclonal, monoclonal, humanized, anti-idiotypic, chimeric, and single chain antibodies as well as Fab, F(ab′)₂, Fab expression library fragments, and epitope-binding fragments of antibodies); and 4) small organic and inorganic molecules (e.g., molecules obtained from combinatorial and natural product libraries).

[0107] One candidate compound is a soluble fragment of the receptor that competes for ligand binding. Other candidate compounds include mutant transporters or appropriate fragments containing mutations that affect transporter function and thus compete for ligand. Accordingly, a fragment that competes for ligand, for example with a higher affinity, or a fragment that binds ligand but does not allow release, is encompassed by the invention.

[0108] The invention further includes other end point assays to identify compounds that modulate (stimulate or inhibit) transporter activity. The assays typically involve an assay of events in the signal transduction pathway that indicate transporter activity. Thus, the transport of a ligand, change in cell membrane potential, activation of a protein, a change in the expression of genes that are up- or down-regulated in response to the transporter protein dependent signal cascade can be assayed.

[0109] Any of the biological or biochemical functions mediated by the transporter can be used as an endpoint assay. These include all of the biochemical or biochemical/biological events described herein, in the references cited herein, incorporated by reference for these endpoint assay targets, and other functions known to those of ordinary skill in the art or that can be readily identified using the information provided in the Figures, particularly FIG. 2. Specifically, a biological function of a cell or tissues that expresses the transporter can be assayed. Experimental data as provided in FIG. 1 indicates that transporter proteins of the present invention are expressed in humans in the the normal testis, lung carcinoid, pooled germ cell tumors detected by virtual northern blots. In addition, In addition, PCR-based tissue screening panels indicate expression in mixed tissue.

[0110] Binding and/or activating compounds can also be screened by using chimeric transporter proteins in which the amino terminal extracellular domain, or parts thereof, the entire transmembrane domain or subregions, such as any of the seven transmembrane segments or any of the intracellular or extracellular loops and the carboxy terminal intracellular domain, or parts thereof, can be replaced by heterologous domains or subregions. For example, a ligand-binding region can be used that interacts with a different ligand then that which is recognized by the native transporter. Accordingly, a different set of signal transduction components is available as an end-point assay for activation. This allows for assays to be performed in other than the specific host cell from which the transporter is derived.

[0111] The proteins of the present invention are also useful in competition binding assays in methods designed to discover compounds that interact with the transporter (e.g. binding partners and/or ligands). Thus, a compound is exposed to a transporter polypeptide under conditions that allow the compound to bind or to otherwise interact with the polypeptide. Soluble transporter polypeptide is also added to the mixture. If the test compound interacts with the soluble transporter polypeptide, it decreases the amount of complex formed or activity from the transporter target. This type of assay is particularly useful in cases in which compounds are sought that interact with specific regions of the transporter. Thus, the soluble polypeptide that competes with the target transporter region is designed to contain peptide sequences corresponding to the region of interest.

[0112] To perform cell free drug screening assays, it is sometimes desirable to immobilize either the transporter protein, or fragment, or its target molecule to facilitate separation of complexes from uncomplexed forms of one or both of the proteins, as well as to accommodate automation of the assay.

[0113] Techniques for immobilizing proteins on matrices can be used in the drug screening assays. In one embodiment, a fusion protein can be provided which adds a domain that allows the protein to be bound to a matrix. For example, glutathione-5-transferase fusion proteins can be adsorbed onto glutathione sepharose beads (Sigma Chemical, St. Louis, Mo.) or glutathione derivatized microtitre plates, which are then combined with the cell lysates (e.g., ³⁵S-labeled) and the candidate compound, and the mixture incubated under conditions conducive to complex formation (e.g., at physiological conditions for salt and pH). Following incubation, the beads are washed to remove any unbound label, and the matrix immobilized and radiolabel determined directly, or in the supernatant after the complexes are dissociated. Alternatively, the complexes can be dissociated from the matrix, separated by SDS-PAGE, and the level of transporter-binding protein found in the bead fraction quantitated from the gel using standard electrophoretic techniques. For example, either the polypeptide or its target molecule can be immobilized utilizing conjugation of biotin and streptavidin using techniques well known in the art. Alternatively, antibodies reactive with the protein but which do not interfere with binding of the protein to its target molecule can be derivatized to the wells of the plate, and the protein trapped in the wells by antibody conjugation. Preparations of a transporter-binding protein and a candidate compound are incubated in the transporter protein-presenting wells and the amount of complex trapped in the well can be quantitated. Methods for detecting such complexes, in addition to those described above for the GST-immobilized complexes, include immunodetection of complexes using antibodies reactive with the transporter protein target molecule, or which are reactive with transporter protein and compete with the target molecule, as well as enzyme-linked assays which rely on detecting an enzymatic activity associated with the target molecule.

[0114] Agents that modulate one of the transporters of the present invention can be identified using one or more of the above assays, alone or in combination. It is generally preferable to use a cell-based or cell free system first and then confirm activity in an animal or other model system. Such model systems are well known in the art and can readily be employed in this context.

[0115] Modulators of transporter protein activity identified according to these drug screening assays can be used to treat a subject with a disorder mediated by the transporter pathway, by treating cells or tissues that express the transporter. Experimental data as provided in FIG. 1 indicates expression in humans in the normal testis, lung carcinoid, pooled germ cell tumors and mixed tissue. These methods of treatment include the steps of administering a modulator of transporter activity in a pharmaceutical composition to a subject in need of such treatment, the modulator being identified as described herein.

[0116] In yet another aspect of the invention, the transporter proteins can be used as “bait proteins” in a two-hybrid assay or three-hybrid assay (see, e.g., U.S. Pat. No. 5,283,317; Zervos et al. (1993) Cell 72:223-232; Madura et al. (1993) J. Biol. Chem. 268:12046-12054; Bartel et al. (1993) Biotechniques 14:920-924; Iwabuchi et al. (1993) Oncogene 8:1693-1696; and Brent WO94/10300), to identify other proteins, which bind to or interact with the transporter and are involved in transporter activity. Such transporter-binding proteins are also likely to be involved in the propagation of signals by the transporter proteins or transporter targets as, for example, downstream elements of a transporter-mediated signaling pathway. Alternatively, such transporter-binding proteins are likely to be transporter inhibitors.

[0117] The two-hybrid system is based on the modular nature of most transcription factors, which consist of separable DNA-binding and activation domains. Briefly, the assay utilizes two different DNA constructs. In one construct, the gene that codes for a transporter protein is fused to a gene encoding the DNA binding domain of a known transcription factor (e.g., GAL-4). In the other construct, a DNA sequence, from a library of DNA sequences, that encodes an unidentified protein (“prey” or “sample”) is fused to a gene that codes for the activation domain of the known transcription factor. If the “bait” and the “prey” proteins are able to interact, in vivo, forming a transporter-dependent complex, the DNA-binding and activation domains of the transcription factor are brought into close proximity. This proximity allows transcription of a reporter gene (e.g., LacZ) which is operably linked to a transcriptional regulatory site responsive to the transcription factor. Expression of the reporter gene can be detected and cell colonies containing the functional transcription factor can be isolated and used to obtain the cloned gene which encodes the protein which interacts with the transporter protein.

[0118] This invention further pertains to novel agents identified by the above-described screening assays. Accordingly, it is within the scope of this invention to further use an agent identified as described herein in an appropriate animal model. For example, an agent identified as described herein (e.g., a transporter-modulating agent, an antisense transporter nucleic acid molecule, a transporter-specific antibody, or a transporter-binding partner) can be used in an animal or other model to determine the efficacy, toxicity, or side effects of treatment with such an agent. Alternatively, an agent identified as described herein can be used in an animal or other model to determine the mechanism of action of such an agent. Furthermore, this invention pertains to uses of novel agents identified by the above-described screening assays for treatments as described herein.

[0119] The transporter proteins of the present invention are also useful to provide a target for diagnosing a disease or predisposition to disease mediated by the peptide. Accordingly, the invention provides methods for detecting the presence, or levels of, the protein (or encoding mRNA) in a cell, tissue, or organism. Experimental data as provided in FIG. 1 indicates expression in humans in the normal testis, lung carcinoid, pooled germ cell tumors and mixed tissue. The method involves contacting a biological sample with a compound capable of interacting with the transporter protein such that the interaction can be detected. Such an assay can be provided in a single detection format or a multi-detection format such as an antibody chip array.

[0120] One agent for detecting a protein in a sample is an antibody capable of selectively binding to protein. A biological sample includes tissues, cells and biological fluids isolated from a subject, as well as tissues, cells and fluids present within a subject.

[0121] The peptides of the present invention also provide targets for diagnosing active protein activity, disease, or predisposition to disease, in a patient having a variant peptide, particularly activities and conditions that are known for other members of the family of proteins to which the present one belongs. Thus, the peptide can be isolated from a biological sample and assayed for the presence of a genetic mutation that results in aberrant peptide. This includes amino acid substitution, deletion, insertion, rearrangement, (as the result of aberrant splicing events), and inappropriate post-translational modification. Analytic methods include altered electrophoretic mobility, altered tryptic peptide digest, altered transporter activity in cell-based or cell-free assay, alteration in ligand or antibody-binding pattern, altered isoelectric point, direct amino acid sequencing, and any other of the known assay techniques useful for detecting mutations in a protein. Such an assay can be provided in a single detection format or a multi-detection format such as an antibody chip array.

[0122] In vitro techniques for detection of peptide include enzyme linked immunosorbent assays (ELISAs), Western blots, immunoprecipitations and immunofluorescence using a detection reagent, such as an antibody or protein binding agent. Alternatively, the peptide can be detected in vivo in a subject by introducing into the subject a labeled anti-peptide antibody or other types of detection agent. For example, the antibody can be labeled with a radioactive marker whose presence and location in a subject can be detected by standard imaging techniques. Particularly useful are methods that detect the allelic variant of a peptide expressed in a subject and methods which detect fragments of a peptide in a sample.

[0123] The peptides are also useful in pharmacogenomic analysis. Pharmacogenomics deal with clinically significant hereditary variations in the response to drugs due to altered drug disposition and abnormal action in affected persons. See, e.g., Eichelbaum, M. (Clin. Exp. Pharmacol. Physiol. 23(10-11):983-985 (1996)), and Linder, M. W. (Clin. Chem. 43(2):254-266 (1997)). The clinical outcomes of these variations result in severe toxicity of therapeutic drugs in certain individuals or therapeutic failure of drugs in certain individuals as a result of individual variation in metabolism. Thus, the genotype of the individual can determine the way a therapeutic compound acts on the body or the way the body metabolizes the compound. Further, the activity of drug metabolizing enzymes effects both the intensity and duration of drug action. Thus, the pharmacogenomics of the individual permit the selection of effective compounds and effective dosages of such compounds for prophylactic or therapeutic treatment based on the individual's genotype. The discovery of genetic polymorphisms in some drug metabolizing enzymes has explained why some patients do not obtain the expected drug effects, show an exaggerated drug effect, or experience serious toxicity from standard drug dosages. Polymorphisms can be expressed in the phenotype of the extensive metabolizer and the phenotype of the poor metabolizer. Accordingly, genetic polymorphism may lead to allelic protein variants of the transporter protein in which one or more of the transporter functions in one population is different from those in another population. The peptides thus allow a target to ascertain a genetic predisposition that can affect treatment modality. Thus, in a ligand-based treatment, polymorphism may give rise to amino terminal extracellular domains and/or other ligand-binding regions that are more or less active in ligand binding, and transporter activation. Accordingly, ligand dosage would necessarily be modified to maximize the therapeutic effect within a given population containing a polymorphism. As an alternative to genotyping, specific polymorphic peptides could be identified.

[0124] The peptides are also useful for treating a disorder characterized by an absence of, inappropriate, or unwanted expression of the protein. Experimental data as provided in FIG. 1 indicates expression in humans in the normal testis, lung carcinoid, pooled germ cell tumors and mixed tissue. Accordingly, methods for treatment include the use of the transporter protein or fragments.

[0125] Antibodies

[0126] The invention also provides antibodies that selectively bind to one of the peptides of the present invention, a protein comprising such a peptide, as well as variants and fragments thereof. As used herein, an antibody selectively binds a target peptide when it binds the target peptide and does not significantly bind to unrelated proteins. An antibody is still considered to selectively bind a peptide even if it also binds to other proteins that are not substantially homologous with the target peptide so long as such proteins share homology with a fragment or domain of the peptide target of the antibody. In this case, it would be understood that antibody binding to the peptide is still selective despite some degree of cross-reactivity.

[0127] As used herein, an antibody is defined in terms consistent with that recognized within the art: they are multi-subunit proteins produced by a mammalian organism in response to an antigen challenge. The antibodies of the present invention include polyclonal antibodies and monoclonal antibodies, as well as fragments of such antibodies, including, but not limited to, Fab or F(ab′)₂, and Fv fragments.

[0128] Many methods are known for generating and/or identifying antibodies to a given target peptide. Several such methods are described by Harlow, Antibodies, Cold Spring Harbor Press, (1989).

[0129] In general, to generate antibodies, an isolated peptide is used as an immunogen and is administered to a mammalian organism, such as a rat, rabbit or mouse. The full-length protein, an antigenic peptide fragment or a fusion protein can be used. Particularly important fragments are those covering functional domains, such as the domains identified in FIG. 2, and domain of sequence homology or divergence amongst the family, such as those that can readily be identified using protein alignment methods and as presented in the Figures.

[0130] Antibodies are preferably prepared from regions or discrete fragments of the transporter proteins. Antibodies can be prepared from any region of the peptide as described herein. However, preferred regions will include those involved in function/activity and/or transporter/binding partner interaction. FIG. 2 can be used to identify particularly important regions while sequence alignment can be used to identify conserved and unique sequence fragments.

[0131] An antigenic fragment will typically comprise at least 8 contiguous amino acid residues. The antigenic peptide can comprise, however, at least 10, 12, 14, 16 or more amino acid residues. Such fragments can be selected on a physical property, such as fragments correspond to regions that are located on the surface of the protein, e.g., hydrophilic regions or can be selected based on sequence uniqueness (see FIG. 2).

[0132] Detection on an antibody of the present invention can be facilitated by coupling (i.e., physically linking) the antibody to a detectable substance. Examples of detectable substances include various enzymes, prosthetic groups, fluorescent materials, luminescent materials, bioluminescent materials, and radioactive materials. Examples of suitable enzymes include horseradish peroxidase, alkaline phosphatase, β-galactosidase, or acetylcholinesterase; examples of suitable prosthetic group complexes include streptavidin/biotin and avidin/biotin; examples of suitable fluorescent materials include umbelliferone, fluorescein, fluorescein isothiocyanate, rhodamine, dichlorotriazinylamine fluorescein, dansyl chloride or phycoerythrin; an example of a luminescent material includes luminol; examples of bioluminescent materials include luciferase, luciferin, and aequorin, and examples of suitable radioactive material include ¹²⁵I, ¹³¹I, ³⁵S or ³H.

[0133] Antibody Uses

[0134] The antibodies can be used to isolate one of the proteins of the present invention by standard techniques, such as affinity chromatography or immunoprecipitation. The antibodies can facilitate the purification of the natural protein from cells and recombinantly produced protein expressed in host cells. In addition, such antibodies are useful to detect the presence of one of the proteins of the present invention in cells or tissues to determine the pattern of expression of the protein among various tissues in an organism and over the course of normal development. Experimental data as provided in FIG. 1 indicates that transporter proteins of the present invention are expressed in humans in the the normal testis, lung carcinoid, pooled germ cell tumors detected by virtual northern blots. In addition, In addition, PCR-based tissue screening panels indicate expression in mixed tissue. Further, such antibodies can be used to detect protein in situ, in vitro, or in a cell lysate or supernatant in order to evaluate the abundance and pattern of expression. Also, such antibodies can be used to assess abnormal tissue distribution or abnormal expression during development or progression of a biological condition. Antibody detection of circulating fragments of the full length protein can be used to identify turnover.

[0135] Further, the antibodies can be used to assess expression in disease states such as in active stages of the disease or in an individual with a predisposition toward disease related to the protein's function. When a disorder is caused by an inappropriate tissue distribution, developmental expression, level of expression of the protein, or expressed/processed form, the antibody can be prepared against the normal protein. Experimental data as provided in FIG. 1 indicates expression in humans in the normal testis, lung carcinoid, pooled germ cell tumors and mixed tissue. If a disorder is characterized by a specific mutation in the protein, antibodies specific for this mutant protein can be used to assay for the presence of the specific mutant protein.

[0136] The antibodies can also be used to assess normal and aberrant subcellular localization of cells in the various tissues in an organism. Experimental data as provided in FIG. 1 indicates expression in humans in the normal testis, lung carcinoid, pooled germ cell tumors and mixed tissue. The diagnostic uses can be applied, not only in genetic testing, but also in monitoring a treatment modality. Accordingly, where treatment is ultimately aimed at correcting expression level or the presence of aberrant sequence and aberrant tissue distribution or developmental expression, antibodies directed against the protein or relevant fragments can be used to monitor therapeutic efficacy.

[0137] Additionally, antibodies are useful in pharmacogenomic analysis. Thus, antibodies prepared against polymorphic proteins can be used to identify individuals that require modified treatment modalities. The antibodies are also useful as diagnostic tools as an immunological marker for aberrant protein analyzed by electrophoretic mobility, isoelectric point, tryptic peptide digest, and other physical assays known to those in the art.

[0138] The antibodies are also useful for tissue typing. Experimental data as provided in FIG. 1 indicates expression in humans in the normal testis, lung carcinoid, pooled germ cell tumors and mixed tissue. Thus, where a specific protein has been correlated with expression in a specific tissue, antibodies that are specific for this protein can be used to identify a tissue type.

[0139] The antibodies are also useful for inhibiting protein function, for example, blocking the binding of the transporter peptide to a binding partner such as a ligand or protein binding partner. These uses can also be applied in a therapeutic context in which treatment involves inhibiting the protein's function. An antibody can be used, for example, to block binding, thus modulating (agonizing or antagonizing) the peptides activity. Antibodies can be prepared against specific fragments containing sites required for function or against intact protein that is associated with a cell or cell membrane. See FIG. 2 for structural information relating to the proteins of the present invention.

[0140] The invention also encompasses kits for using antibodies to detect the presence of a protein in a biological sample. The kit can comprise antibodies such as a labeled or labelable antibody and a compound or agent for detecting protein in a biological sample; means for determining the amount of protein in the sample; means for comparing the amount of protein in the sample with a standard; and instructions for use. Such a kit can be supplied to detect a single protein or epitope or can be configured to detect one of a multitude of epitopes, such as in an antibody detection array. Arrays are described in detail below for nucleic acid arrays and similar methods have been developed for antibody arrays.

[0141] Nucleic Acid Molecules

[0142] The present invention further provides isolated nucleic acid molecules that encode a transporter peptide or protein of the present invention (cDNA, transcript and genomic sequence). Such nucleic acid molecules will consist of, consist essentially of, or comprise a nucleotide sequence that encodes one of the transporter peptides of the present invention, an allelic variant thereof, or an ortholog or paralog thereof.

[0143] As used herein, an “isolated” nucleic acid molecule is one that is separated from other nucleic acid present in the natural source of the nucleic acid. Preferably, an “isolated” nucleic acid is free of sequences that naturally flank the nucleic acid (i.e., sequences located at the 5′ and 3′ ends of the nucleic acid) in the genomic DNA of the organism from which the nucleic acid is derived. However, there can be some flanking nucleotide sequences, for example up to about 5 KB, 4 KB, 3 KB, 2 KB, or 1 KB or less, particularly contiguous peptide encoding sequences and peptide encoding sequences within the same gene but separated by introns in the genomic sequence. The important point is that the nucleic acid is isolated from remote and unimportant flanking sequences such that it can be subjected to the specific manipulations described herein such as recombinant expression, preparation of probes and primers, and other uses specific to the nucleic acid sequences.

[0144] Moreover, an “isolated” nucleic acid molecule, such as a transcript/cDNA molecule, can be substantially free of other cellular material, or culture medium when produced by recombinant techniques, or chemical precursors or other chemicals when chemically synthesized. However, the nucleic acid molecule can be fused to other coding or regulatory sequences and still be considered isolated.

[0145] For example, recombinant DNA molecules contained in a vector are considered isolated. Further examples of isolated DNA molecules include recombinant DNA molecules maintained in heterologous host cells or purified (partially or substantially) DNA molecules in solution. Isolated RNA molecules include in vivo or in vitro RNA transcripts of the isolated DNA molecules of the present invention. Isolated nucleic acid molecules according to the present invention further include such molecules produced synthetically.

[0146] Accordingly, the present invention provides nucleic acid molecules that consist of the nucleotide sequence shown in FIG. 1 or 3 (SEQ ID NO:1, transcript sequence and SEQ ID NO:3, genomic sequence), or any nucleic acid molecule that encodes the protein provided in FIG. 2, SEQ ID NO:2. A nucleic acid molecule consists of a nucleotide sequence when the nucleotide sequence is the complete nucleotide sequence of the nucleic acid molecule.

[0147] The present invention further provides nucleic acid molecules that consist essentially of the nucleotide sequence shown in FIG. 1 or 3 (SEQ ID NO:1, transcript sequence and SEQ ID NO:3, genomic sequence), or any nucleic acid molecule that encodes the protein provided in FIG. 2, SEQ ID NO:2. A nucleic acid molecule consists essentially of a nucleotide sequence when such a nucleotide sequence is present with only a few additional nucleic acid residues in the final nucleic acid molecule.

[0148] The present invention further provides nucleic acid molecules that comprise the nucleotide sequences shown in FIG. 1 or 3 (SEQ ID NO:1, transcript sequence and SEQ ID NO:3, genomic sequence), or any nucleic acid molecule that encodes the protein provided in FIG. 2, SEQ ID NO:2. A nucleic acid molecule comprises a nucleotide sequence when the nucleotide sequence is at least part of the final nucleotide sequence of the nucleic acid molecule. In such a fashion, the nucleic acid molecule can be only the nucleotide sequence or have additional nucleic acid residues, such as nucleic acid residues that are naturally associated with it or heterologous nucleotide sequences. Such a nucleic acid molecule can have a few additional nucleotides or can comprise several hundred or more additional nucleotides. A brief description of how various types of these nucleic acid molecules can be readily made/isolated is provided below.

[0149] In FIGS. 1 and 3, both coding and non-coding sequences are provided. Because of the source of the present invention, humans genomic sequence (FIG. 3) and cDNA/transcript sequences (FIG. 1), the nucleic acid molecules in the Figures will contain genomic intronic sequences, 5′ and 3′ non-coding sequences, gene regulatory regions and non-coding intergenic sequences. In general such sequence features are either noted in FIGS. 1 and 3 or can readily be identified using computational tools known in the art. As discussed below, some of the non-coding regions, particularly gene regulatory elements such as promoters, are useful for a variety of purposes, e.g. control of heterologous gene expression, target for identifying gene activity modulating compounds, and are particularly claimed as fragments of the genomic sequence provided herein.

[0150] The isolated nucleic acid molecules can encode the mature protein plus additional amino or carboxyl-terminal amino acids, or amino acids interior to the mature peptide (when the mature form has more than one peptide chain, for instance). Such sequences may play a role in processing of a protein from precursor to a mature form, facilitate protein trafficking, prolong or shorten protein half-life or facilitate manipulation of a protein for assay or production, among other things. As generally is the case in situ, the additional amino acids may be processed away from the mature protein by cellular enzymes.

[0151] As mentioned above, the isolated nucleic acid molecules include, but are not limited to, the sequence encoding the transporter peptide alone, the sequence encoding the mature peptide and additional coding sequences, such as a leader or secretory sequence (e.g., a pre-pro or pro-protein sequence), the sequence encoding the mature peptide, with or without the additional coding sequences, plus additional non-coding sequences, for example introns and non-coding 5′ and 3′ sequences such as transcribed but non-translated sequences that play a role in transcription, mRNA processing (including splicing and polyadenylation signals), ribosome binding and stability of mRNA. In addition, the nucleic acid molecule may be fused to a marker sequence encoding, for example, a peptide that facilitates purification.

[0152] Isolated nucleic acid molecules can be in the form of RNA, such as mRNA, or in the form DNA, including cDNA and genomic DNA obtained by cloning or produced by chemical synthetic techniques or by a combination thereof. The nucleic acid, especially DNA, can be double-stranded or single-stranded. Single-stranded nucleic acid can be the coding strand (sense strand) or the non-coding strand (anti-sense strand).

[0153] The invention further provides nucleic acid molecules that encode fragments of the peptides of the present invention as well as nucleic acid molecules that encode obvious variants of the transporter proteins of the present invention that are described above. Such nucleic acid molecules may be naturally occurring, such as allelic variants (same locus), paralogs (different locus), and orthologs (different organism), or may be constructed by recombinant DNA methods or by chemical synthesis. Such non-naturally occurring variants may be made by mutagenesis techniques, including those applied to nucleic acid molecules, cells, or organisms. Accordingly, as discussed above, the variants can contain nucleotide substitutions, deletions, inversions and insertions. Variation can occur in either or both the coding and non-coding regions. The variations can produce both conservative and non-conservative amino acid substitutions.

[0154] The present invention further provides non-coding fragments of the nucleic acid molecules provided in FIGS. 1 and 3. Preferred non-coding fragments include, but are not limited to, promoter sequences, enhancer sequences, gene modulating sequences and gene termination sequences. Such fragments are useful in controlling heterologous gene expression and in developing screens to identify gene-modulating agents. A promoter can readily be identified as being 5′ to the ATG start site in the genomic sequence provided in FIG. 3.

[0155] A fragment comprises a contiguous nucleotide sequence greater than 12 or more nucleotides. Further, a fragment could at least 30, 40, 50, 100, 250 or 500 nucleotides in length. The length of the fragment will be based on its intended use. For example, the fragment can encode epitope bearing regions of the peptide, or can be useful as DNA probes and primers. Such fragments can be isolated using the known nucleotide sequence to synthesize an oligonucleotide probe. A labeled probe can then be used to screen a cDNA library, genomic DNA library, or mRNA to isolate nucleic acid corresponding to the coding region. Further, primers can be used in PCR reactions to clone specific regions of gene.

[0156] A probe/primer typically comprises substantially a purified oligonucleotide or oligonucleotide pair. The oligonucleotide typically comprises a region of nucleotide sequence that hybridizes under stringent conditions to at least about 12, 20, 25, 40, 50 or more consecutive nucleotides.

[0157] Orthologs, homologs, and allelic variants can be identified using methods well known in the art. As described in the Peptide Section, these variants comprise a nucleotide sequence encoding a peptide that is typically 60-70%, 70-80%, 80-90%, and more typically at least about 90-95% or more homologous to the nucleotide sequence shown in the Figure sheets or a fragment of this sequence. Such nucleic acid molecules can readily be identified as being able to hybridize under moderate to stringent conditions, to the nucleotide sequence shown in the Figure sheets or a fragment of the sequence. Allelic variants can readily be determined by genetic locus of the encoding gene. As indicated by the data presented in FIG. 3, the map position was determined to be on chromosome 13 by ePCR.

[0158] As used herein, the term “hybridizes under stringent conditions” is intended to describe conditions for hybridization and washing under which nucleotide sequences encoding a peptide at least 60-70% homologous to each other typically remain hybridized to each other. The conditions can be such that sequences at least about 60%, at least about 70%, or at least about 80% or more homologous to each other typically remain hybridized to each other. Such stringent conditions are known to those skilled in the art and can be found in Current Protocols in Molecular Biology, John Wiley & Sons, N.Y. (1989), 6.3.1-6.3.6. One example of stringent hybridization conditions are hybridization in 6× sodium chloride/sodium citrate (SSC) at about 45C, followed by one or more washes in 0.2×SSC, 0.1% SDS at 50-65C. Examples of moderate to low stringency hybridization conditions are well known in the art.

[0159] Nucleic Acid Molecule Uses

[0160] The nucleic acid molecules of the present invention are useful for probes, primers, chemical intermediates, and in biological assays. The nucleic acid molecules are useful as a hybridization probe for messenger RNA, transcript/cDNA and genomic DNA to isolate full-length cDNA and genomic clones encoding the peptide described in FIG. 2 and to isolate cDNA and genomic clones that correspond to variants (alleles, orthologs, etc.) producing the same or related peptides shown in FIG. 2.

[0161] The probe can correspond to any sequence along the entire length of the nucleic acid molecules provided in the Figures. Accordingly, it could be derived from 5′ noncoding regions, the coding region, and 3′ noncoding regions. However, as discussed, fragments are not to be construed as encompassing fragments disclosed prior to the present invention.

[0162] The nucleic acid molecules are also useful as primers for PCR to amplify any given region of a nucleic acid molecule and are useful to synthesize antisense molecules of desired length and sequence.

[0163] The nucleic acid molecules are also useful for constructing recombinant vectors. Such vectors include expression vectors that express a portion of, or all of, the peptide sequences. Vectors also include insertion vectors, used to integrate into another nucleic acid molecule sequence, such as into the cellular genome, to alter in situ expression of a gene and/or gene product. For example, an endogenous coding sequence can be replaced via homologous recombination with all or part of the coding region containing one or more specifically introduced mutations.

[0164] The nucleic acid molecules are also useful for expressing antigenic portions of the proteins.

[0165] The nucleic acid molecules are also useful as probes for determining the chromosomal positions of the nucleic acid molecules by means of in situ hybridization methods. As indicated by the data presented in FIG. 3, the map position was determined to be on chromosome 13 by ePCR.

[0166] The nucleic acid molecules are also useful in making vectors containing the gene regulatory regions of the nucleic acid molecules of the present invention.

[0167] The nucleic acid molecules are also useful for designing ribozymes corresponding to all, or a part, of the mRNA produced from the nucleic acid molecules described herein.

[0168] The nucleic acid molecules are also useful for making vectors that express part, or all, of the peptides.

[0169] The nucleic acid molecules are also useful for constructing host cells expressing a part, or all, of the nucleic acid molecules and peptides.

[0170] The nucleic acid molecules are also useful for constructing transgenic animals expressing all, or a part, of the nucleic acid molecules and peptides.

[0171] The nucleic acid molecules are also useful as hybridization probes for determining the presence, level, form and distribution of nucleic acid expression. Experimental data as provided in FIG. 1 indicates that transporter proteins of the present invention are expressed in humans in the the normal testis, lung carcinoid, pooled germ cell tumors detected by virtual northern blots. In addition, In addition, PCR-based tissue screening panels indicate expression in mixed tissue.

[0172] Accordingly, the probes can be used to detect the presence of, or to determine levels of, a specific nucleic acid molecule in cells, tissues, and in organisms. The nucleic acid whose level is determined can be DNA or RNA. Accordingly, probes corresponding to the peptides described herein can be used to assess expression and/or gene copy number in a given cell, tissue, or organism. These uses are relevant for diagnosis of disorders involving an increase or decrease in transporter protein expression relative to normal results.

[0173] In vitro techniques for detection of mRNA include Northern hybridizations and in situ hybridizations. In vitro techniques for detecting DNA include Southern hybridizations and in situ hybridization.

[0174] Probes can be used as a part of a diagnostic test kit for identifying cells or tissues that express a transporter protein, such as by measuring a level of a transporter-encoding nucleic acid in a sample of cells from a subject e.g., mRNA or genomic DNA, or determining if a transporter gene has been mutated. Experimental data as provided in FIG. 1 indicates that transporter proteins of the present invention are expressed in humans in the the normal testis, lung carcinoid, pooled germ cell tumors detected by virtual northern blots. In addition, In addition, PCR-based tissue screening panels indicate expression in mixed tissue.

[0175] Nucleic acid expression assays are useful for drug screening to identify compounds that modulate transporter nucleic acid expression.

[0176] The invention thus provides a method for identifying a compound that can be used to treat a disorder associated with nucleic acid expression of the transporter gene, particularly biological and pathological processes that are mediated by the transporter in cells and tissues that express it. Experimental data as provided in FIG. 1 indicates expression in humans in the normal testis, lung carcinoid, pooled germ cell tumors and mixed tissue. The method typically includes assaying the ability of the compound to modulate the expression of the transporter nucleic acid and thus identifying a compound that can be used to treat a disorder characterized by undesired transporter nucleic acid expression. The assays can be performed in cell-based and cell-free systems. Cell-based assays include cells naturally expressing the transporter nucleic acid or recombinant cells genetically engineered to express specific nucleic acid sequences.

[0177] The assay for transporter nucleic acid expression can involve direct assay of nucleic acid levels, such as mRNA levels, or on collateral compounds involved in the signal pathway. Further, the expression of genes that are up- or down-regulated in response to the transporter protein signal pathway can also be assayed. In this embodiment the regulatory regions of these genes can be operably linked to a reporter gene such as luciferase.

[0178] Thus, modulators of transporter gene expression can be identified in a method wherein a cell is contacted with a candidate compound and the expression of mRNA determined. The level of expression of transporter mRNA in the presence of the candidate compound is compared to the level of expression of transporter mRNA in the absence of the candidate compound. The candidate compound can then be identified as a modulator of nucleic acid expression based on this comparison and be used, for example to treat a disorder characterized by aberrant nucleic acid expression. When expression of mRNA is statistically significantly greater in the presence of the candidate compound than in its absence, the candidate compound is identified as a stimulator of nucleic acid expression. When nucleic acid expression is statistically significantly less in the presence of the candidate compound than in its absence, the candidate compound is identified as an inhibitor of nucleic acid expression.

[0179] The invention further provides methods of treatment, with the nucleic acid as a target, using a compound identified through drug screening as a gene modulator to modulate transporter nucleic acid expression in cells and tissues that express the transporter. Experimental data as provided in FIG. 1 indicates that transporter proteins of the present invention are expressed in humans in the the normal testis, lung carcinoid, pooled germ cell tumors detected by virtual northern blots. In addition, In addition, PCR-based tissue screening panels indicate expression in mixed tissue. Modulation includes both up-regulation (i.e. activation or agonization) or down-regulation (suppression or antagonization) or nucleic acid expression.

[0180] Alternatively, a modulator for transporter nucleic acid expression can be a small molecule or drug identified using the screening assays described herein as long as the drug or small molecule inhibits the transporter nucleic acid expression in the cells and tissues that express the protein. Experimental data as provided in FIG. 1 indicates expression in humans in the normal testis, lung carcinoid, pooled germ cell tumors and mixed tissue.

[0181] The nucleic acid molecules are also useful for monitoring the effectiveness of modulating compounds on the expression or activity of the transporter gene in clinical trials or in a treatment regimen. Thus, the gene expression pattern can serve as a barometer for the continuing effectiveness of treatment with the compound, particularly with compounds to which a patient can develop resistance. The gene expression pattern can also serve as a marker indicative of a physiological response of the affected cells to the compound. Accordingly, such monitoring would allow either increased administration of the compound or the administration of alternative compounds to which the patient has not become resistant. Similarly, if the level of nucleic acid expression falls below a desirable level, administration of the compound could be commensurately decreased.

[0182] The nucleic acid molecules are also useful in diagnostic assays for qualitative changes in transporter nucleic acid expression, and particularly in qualitative changes that lead to pathology. The nucleic acid molecules can be used to detect mutations in transporter genes and gene expression products such as mRNA. The nucleic acid molecules can be used as hybridization probes to detect naturally occurring genetic mutations in the transporter gene and thereby to determine whether a subject with the mutation is at risk for a disorder caused by the mutation. Mutations include deletion, addition, or substitution of one or more nucleotides in the gene, chromosomal rearrangement, such as inversion or transposition, modification of genomic DNA, such as aberrant methylation patterns or changes in gene copy number, such as amplification. Detection of a mutated form of the transporter gene associated with a dysfunction provides a diagnostic tool for an active disease or susceptibility to disease when the disease results from overexpression, underexpression, or altered expression of a transporter protein.

[0183] Individuals carrying mutations in the transporter gene can be detected at the nucleic acid level by a variety of techniques. As indicated by the data presented in FIG. 3, the map position was determined to be on chromosome 13 by ePCR. Genomic DNA can be analyzed directly or can be amplified by using PCR prior to analysis. RNA or cDNA can be used in the same way. In some uses, detection of the mutation involves the use of a probe/primer in a polymerase chain reaction (PCR) (see, e.g. U.S. Pat. Nos. 4,683,195 and 4,683,202), such as anchor PCR or RACE PCR, or, alternatively, in a ligation chain reaction (LCR) (see, e.g., Landegran et al., Science 241:1077-1080 (1988); and Nakazawa et al., PNAS 91:360-364 (1994)), the latter of which can be particularly useful for detecting point mutations in the gene (see Abravaya et al., Nucleic Acids Res. 23:675-682 (1995)). This method can include the steps of collecting a sample of cells from a patient, isolating nucleic acid (e.g., genomic, mRNA or both) from the cells of the sample, contacting the nucleic acid sample with one or more primers which specifically hybridize to a gene under conditions such that hybridization and amplification of the gene (if present) occurs, and detecting the presence or absence of an amplification product, or detecting the size of the amplification product and comparing the length to a control sample. Deletions and insertions can be detected by a change in size of the amplified product compared to the normal genotype. Point mutations can be identified by hybridizing amplified DNA to normal RNA or antisense DNA sequences.

[0184] Alternatively, mutations in a transporter gene can be directly identified, for example, by alterations in restriction enzyme digestion patterns determined by gel electrophoresis.

[0185] Further, sequence-specific ribozymes (U.S. Pat. No. 5,498,531) can be used to score for the presence of specific mutations by development or loss of a ribozyme cleavage site. Perfectly matched sequences can be distinguished from mismatched sequences by nuclease cleavage digestion assays or by differences in melting temperature.

[0186] Sequence changes at specific locations can also be assessed by nuclease protection assays such as RNase and S1 protection or the chemical cleavage method. Furthermore, sequence differences between a mutant transporter gene and a wild-type gene can be determined by direct DNA sequencing. A variety of automated sequencing procedures can be utilized when performing the diagnostic assays (Naeve, C. W., (1995) Biotechniques 19:448), including sequencing by mass spectrometry (see, e.g., PCT International Publication No. WO 94/16101; Cohen et al., Adv. Chromatogr. 36:127-162 (1996); and Griffin et al., Appl. Biochem. Biotechnol. 38:147-159 (1993)).

[0187] Other methods for detecting mutations in the gene include methods in which protection from cleavage agents is used to detect mismatched bases in RNA/RNA or RNA/DNA duplexes (Myers et al., Science 230:1242 (1985)); Cotton et al., PNAS 85:4397 (1988); Saleeba et al., Meth. Enzymol. 217:286-295 (1992)), electrophoretic mobility of mutant and wild type nucleic acid is compared (Orita et al., PNAS 86:2766 (1989); Cotton et al., Mutat. Res. 285:125-144 (1993); and Hayashi et al., Genet. Anal. Tech. Appl. 9:73-79 (1992)), and movement of mutant or wild-type fragments in polyacrylamide gels containing a gradient of denaturant is assayed using denaturing gradient gel electrophoresis (Myers et al., Nature 313:495 (1985)). Examples of other techniques for detecting point mutations include selective oligonucleotide hybridization, selective amplification, and selective primer extension.

[0188] The nucleic acid molecules are also useful for testing an individual for a genotype that while not necessarily causing the disease, nevertheless affects the treatment modality. Thus, the nucleic acid molecules can be used to study the relationship between an individual's genotype and the individual's response to a compound used for treatment (pharmacogenomic relationship). Accordingly, the nucleic acid molecules described herein can be used to assess the mutation content of the transporter gene in an individual in order to select an appropriate compound or dosage regimen for treatment.

[0189] Thus nucleic acid molecules displaying genetic variations that affect treatment provide a diagnostic target that can be used to tailor treatment in an individual. Accordingly, the production of recombinant cells and animals containing these polymorphisms allow effective clinical design of treatment compounds and dosage regimens.

[0190] The nucleic acid molecules are thus useful as antisense constructs to control transporter gene expression in cells, tissues, and organisms. A DNA antisense nucleic acid molecule is designed to be complementary to a region of the gene involved in transcription, preventing transcription and hence production of transporter protein. An antisense RNA or DNA nucleic acid molecule would hybridize to the mRNA and thus block translation of mRNA into transporter protein.

[0191] Alternatively, a class of antisense molecules can be used to inactivate mRNA in order to decrease expression of transporter nucleic acid. Accordingly, these molecules can treat a disorder characterized by abnormal or undesired transporter nucleic acid expression. This technique involves cleavage by means of ribozymes containing nucleotide sequences complementary to one or more regions in the mRNA that attenuate the ability of the mRNA to be translated. Possible regions include coding regions and particularly coding regions corresponding to the catalytic and other functional activities of the transporter protein, such as ligand binding.

[0192] The nucleic acid molecules also provide vectors for gene therapy in patients containing cells that are aberrant in transporter gene expression. Thus, recombinant cells, which include the patient's cells that have been engineered ex vivo and returned to the patient, are introduced into an individual where the cells produce the desired transporter protein to treat the individual.

[0193] The invention also encompasses kits for detecting the presence of a transporter nucleic acid in a biological sample. Experimental data as provided in FIG. 1 indicates that transporter proteins of the present invention are expressed in humans in the the normal testis, lung carcinoid, pooled germ cell tumors detected by virtual northern blots. In addition, In addition, PCR-based tissue screening panels indicate expression in mixed tissue. For example, the kit can comprise reagents such as a labeled or labelable nucleic acid or agent capable of detecting transporter nucleic acid in a biological sample; means for determining the amount of transporter nucleic acid in the sample; and means for comparing the amount of transporter nucleic acid in the sample with a standard. The compound or agent can be packaged in a suitable container. The kit can further comprise instructions for using the kit to detect transporter protein mRNA or DNA.

[0194] Nucleic Acid Arrays

[0195] The present invention further provides nucleic acid detection kits, such as arrays or microarrays of nucleic acid molecules that are based on the sequence information provided in FIGS. 1 and 3 (SEQ ID NOS:1 and 3).

[0196] As used herein “Arrays” or “Microarrays” refers to an array of distinct polynucleotides or oligonucleotides synthesized on a substrate, such as paper, nylon or other type of membrane, filter, chip, glass slide, or any other suitable solid support. In one embodiment, the microarray is prepared and used according to the methods described in U.S. Pat. No. 5,837,832, Chee et al., PCT application WO95/11995 (Chee et al.), Lockhart, D. J. et al. (1996; Nat. Biotech. 14: 1675-1680) and Schena, M. et al. (1996; Proc. Natl. Acad. Sci. 93: 10614-10619), all of which are incorporated herein in their entirety by reference. In other embodiments, such arrays are produced by the methods described by Brown et al., U.S. Pat. No. 5,807,522.

[0197] The microarray or detection kit is preferably composed of a large number of unique, single-stranded nucleic acid sequences, usually either synthetic antisense oligonucleotides or fragments of cDNAs, fixed to a solid support. The oligonucleotides are preferably about 6-60 nucleotides in length, more preferably 15-30 nucleotides in length, and most preferably about 20-25 nucleotides in length. For a certain type of microarray or detection kit, it may be preferable to use oligonucleotides that are only 7-20 nucleotides in length. The microarray or detection kit may contain oligonucleotides that cover the known 5′, or 3′, sequence, sequential oligonucleotides that cover the full length sequence; or unique oligonucleotides selected from particular areas along the length of the sequence. Polynucleotides used in the microarray or detection kit may be oligonucleotides that are specific to a gene or genes of interest.

[0198] In order to produce oligonucleotides to a known sequence for a microarray or detection kit, the gene(s) of interest (or an ORF identified from the contigs of the present invention) is typically examined using a computer algorithm which starts at the 5′ or at the 3′ end of the nucleotide sequence. Typical algorithms will then identify oligomers of defined length that are unique to the gene, have a GC content within a range suitable for hybridization, and lack predicted secondary structure that may interfere with hybridization. In certain situations it may be appropriate to use pairs of oligonucleotides on a microarray or detection kit. The “pairs” will be identical, except for one nucleotide that preferably is located in the center of the sequence. The second oligonucleotide in the pair (mismatched by one) serves as a control. The number of oligonucleotide pairs may range from two to one million. The oligomers are synthesized at designated areas on a substrate using a light-directed chemical process. The substrate may be paper, nylon or other type of membrane, filter, chip, glass slide or any other suitable solid support.

[0199] In another aspect, an oligonucleotide may be synthesized on the surface of the substrate by using a chemical coupling procedure and an ink jet application apparatus, as described in PCT application W095/251116 (Baldeschweiler et al.) which is incorporated herein in its entirety by reference. In another aspect, a “gridded” array analogous to a dot (or slot) blot may be used to arrange and link cDNA fragments or oligonucleotides to the surface of a substrate using a vacuum system, thermal, UV, mechanical or chemical bonding procedures. An array, such as those described above, may be produced by hand or by using available devices (slot blot or dot blot apparatus), materials (any suitable solid support), and machines (including robotic instruments), and may contain 8, 24, 96, 384, 1536, 6144 or more oligonucleotides, or any other number between two and one million which lends itself to the efficient use of commercially available instrumentation.

[0200] In order to conduct sample analysis using a microarray or detection kit, the RNA or DNA from a biological sample is made into hybridization probes. The mRNA is isolated, and cDNA is produced and used as a template to make antisense RNA (aRNA). The aRNA is amplified in the presence of fluorescent nucleotides, and labeled probes are incubated with the microarray or detection kit so that the probe sequences hybridize to complementary oligonucleotides of the microarray or detection kit. Incubation conditions are adjusted so that hybridization occurs with precise complementary matches or with various degrees of less complementarity. After removal of nonhybridized probes, a scanner is used to determine the levels and patterns of fluorescence. The scanned images are examined to determine degree of complementarity and the relative abundance of each oligonucleotide sequence on the microarray or detection kit. The biological samples may be obtained from any bodily fluids (such as blood, urine, saliva, phlegm, gastric juices, etc.), cultured cells, biopsies, or other tissue preparations. A detection system may be used to measure the absence, presence, and amount of hybridization for all of the distinct sequences simultaneously. This data may be used for large-scale correlation studies on the sequences, expression patterns, mutations, variants, or polymorphisms among samples.

[0201] Using such arrays, the present invention provides methods to identify the expression of the transporter proteins/peptides of the present invention. In detail, such methods comprise incubating a test sample with one or more nucleic acid molecules and assaying for binding of the nucleic acid molecule with components within the test sample. Such assays will typically involve arrays comprising many genes, at least one of which is a gene of the present invention and or alleles of the transporter gene of the present invention.

[0202] Conditions for incubating a nucleic acid molecule with a test sample vary. Incubation conditions depend on the format employed in the assay, the detection methods employed, and the type and nature of the nucleic acid molecule used in the assay. One skilled in the art will recognize that any one of the commonly available hybridization, amplification or array assay formats can readily be adapted to employ the novel fragments of the Human genome disclosed herein. Examples of such assays can be found in Chard, T, An Introduction to Radioimmunoassay and Related Techniques, Elsevier Science Publishers, Amsterdam, The Netherlands (1986); Bullock, G. R. et al, Techniques in Immunocytochemistry, Academic Press, Orlando, Fla. Vol. 1 (1982), Vol. 2 (1983), Vol. 3 (1985); Tijssen, P., Practice and Theory of Enzyme Immunoassays: Laboratory Techniques in Biochemistry and Molecular Biology, Elsevier Science Publishers, Amsterdam, The Netherlands (1985).

[0203] The test samples of the present invention include cells, protein or membrane extracts of cells. The test sample used in the above-described method will vary based on the assay format, nature of the detection method and the tissues, cells or extracts used as the sample to be assayed. Methods for preparing nucleic acid extracts or of cells are well known in the art and can be readily be adapted in order to obtain a sample that is compatible with the system utilized.

[0204] In another embodiment of the present invention, kits are provided which contain the necessary reagents to carry out the assays of the present invention.

[0205] Specifically, the invention provides a compartmentalized kit to receive, in close confinement, one or more containers which comprises: (a) a first container comprising one of the nucleic acid molecules that can bind to a fragment of the Human genome disclosed herein; and (b) one or more other containers comprising one or more of the following: wash reagents, reagents capable of detecting presence of a bound nucleic acid.

[0206] In detail, a compartmentalized kit includes any kit in which reagents are contained in separate containers. Such containers include small glass containers, plastic containers, strips of plastic, glass or paper, or arraying material such as silica. Such containers allows one to efficiently transfer reagents from one compartment to another compartment such that the samples and reagents are not cross-contaminated, and the agents or solutions of each container can be added in a quantitative fashion from one compartment to another. Such containers will include a container which will accept the test sample, a container which contains the nucleic acid probe, containers which contain wash reagents (such as phosphate buffered saline, Tris-buffers, etc.), and containers which contain the reagents used to detect the bound probe. One skilled in the art will readily recognize that the previously unidentified transporter gene of the present invention can be routinely identified using the sequence information disclosed herein can be readily incorporated into one of the established kit formats which are well known in the art, particularly expression arrays.

[0207] Vectors/host Cells

[0208] The invention also provides vectors containing the nucleic acid molecules described herein. The term “vector” refers to a vehicle, preferably a nucleic acid molecule, which can transport the nucleic acid molecules. When the vector is a nucleic acid molecule, the nucleic acid molecules are covalently linked to the vector nucleic acid. With this aspect of the invention, the vector includes a plasmid, single or double stranded phage, a single or double stranded RNA or DNA viral vector, or artificial chromosome, such as a BAC, PAC, YAC, OR MAC.

[0209] A vector can be maintained in the host cell as an extrachromosomal element where it replicates and produces additional copies of the nucleic acid molecules. Alternatively, the vector may integrate into the host cell genome and produce additional copies of the nucleic acid molecules when the host cell replicates.

[0210] The invention provides vectors for the maintenance (cloning vectors) or vectors for expression (expression vectors) of the nucleic acid molecules. The vectors can function in procaryotic or eukaryotic cells or in both (shuttle vectors).

[0211] Expression vectors contain cis-acting regulatory regions that are operably linked in the vector to the nucleic acid molecules such that transcription of the nucleic acid molecules is allowed in a host cell. The nucleic acid molecules can be introduced into the host cell with a separate nucleic acid molecule capable of affecting transcription. Thus, the second nucleic acid molecule may provide a trans-acting factor interacting with the cis-regulatory control region to allow transcription of the nucleic acid molecules from the vector. Alternatively, a trans-acting factor may be supplied by the host cell. Finally, a trans-acting factor can be produced from the vector itself. It is understood, however, that in some embodiments, transcription and/or translation of the nucleic acid molecules can occur in a cell-free system.

[0212] The regulatory sequence to which the nucleic acid molecules described herein can be operably linked include promoters for directing mRNA transcription. These include, but are not limited to, the left promoter from bacteriophage λ, the lac, TRP, and TAC promoters from E. coli, the early and late promoters from SV40, the CMV immediate early promoter, the adenovirus early and late promoters, and retrovirus long-terminal repeats.

[0213] In addition to control regions that promote transcription, expression vectors may also include regions that modulate transcription, such as repressor binding sites and enhancers. Examples include the SV40 enhancer, the cytomegalovirus immediate early enhancer, polyoma enhancer, adenovirus enhancers, and retrovirus LTR enhancers.

[0214] In addition to containing sites for transcription initiation and control, expression vectors can also contain sequences necessary for transcription termination and, in the transcribed region a ribosome binding site for translation. Other regulatory control elements for expression include initiation and termination codons as well as polyadenylation signals. The person of ordinary skill in the art would be aware of the numerous regulatory sequences that are useful in expression vectors. Such regulatory sequences are described, for example, in Sambrook et al, Molecular Cloning: A Laboratory Manual. 2nd. ed., Cold Spring Harbor Laboratory Press, Cold Spring Harbor, N.Y., (1989).

[0215] A variety of expression vectors can be used to express a nucleic acid molecule. Such vectors include chromosomal, episomal, and virus-derived vectors, for example vectors derived from bacterial plasmids, from bacteriophage, from yeast episomes, from yeast chromosomal elements, including yeast artificial chromosomes, from viruses such as baculoviruses, papovaviruses such as SV40, Vaccinia viruses, adenoviruses, poxviruses, pseudorabies viruses, and retroviruses. Vectors may also be derived from combinations of these sources such as those derived from plasmid and bacteriophage genetic elements, e.g. cosmids and phagemids. Appropriate cloning and expression vectors for prokaryotic and eukaryotic hosts are described in Sambrook et al., Molecular Cloning: A Laboratory Manual. 2nd. ed., Cold Spring Harbor Laboratory Press, Cold Spring Harbor, N.Y., (1989).

[0216] The regulatory sequence may provide constitutive expression in one or more host cells (i.e. tissue specific) or may provide for inducible expression in one or more cell types such as by temperature, nutrient additive, or exogenous factor such as a hormone or other ligand. A variety of vectors providing for constitutive and inducible expression in prokaryotic and eukaryotic hosts are well known to those of ordinary skill in the art.

[0217] The nucleic acid molecules can be inserted into the vector nucleic acid by well-known methodology. Generally, the DNA sequence that will ultimately be expressed is joined to an expression vector by cleaving the DNA sequence and the expression vector with one or more restriction enzymes and then ligating the fragments together. Procedures for restriction enzyme digestion and ligation are well known to those of ordinary skill in the art.

[0218] The vector containing the appropriate nucleic acid molecule can be introduced into an appropriate host cell for propagation or expression using well-known techniques. Bacterial cells include, but are not limited to, E. coli, Streptomyces, and Salmonella typhimurium. Eukaryotic cells include, but are not limited to, yeast, insect cells such as Drosophila, animal cells such as COS and CHO cells, and plant cells.

[0219] As described herein, it may be desirable to express the peptide as a fusion protein. Accordingly, the invention provides fusion vectors that allow for the production of the peptides. Fusion vectors can increase the expression of a recombinant protein, increase the solubility of the recombinant protein, and aid in the purification of the protein by acting for example as a ligand for affinity purification. A proteolytic cleavage site may be introduced at the junction of the fusion moiety so that the desired peptide can ultimately be separated from the fusion moiety. Proteolytic enzymes include, but are not limited to, factor Xa, thrombin, and enterotransporter. Typical fusion expression vectors include pGEX (Smith et al., Gene 67:31-40 (1988)), pMAL (New England Biolabs, Beverly, Mass.) and pRIT5 (Pharmacia, Piscataway, N.J.) which fuse glutathione S-transferase (GST), maltose E binding protein, or protein A, respectively, to the target recombinant protein. Examples of suitable inducible non-fusion E. coli expression vectors include pTrc (Amann et al., Gene 69:301-315 (1988)) and pET 11d (Studier et al., Gene Expression Technology. Methods in Enzymology 185:60-89 (1990)).

[0220] Recombinant protein expression can be maximized in host bacteria by providing a genetic background wherein the host cell has an impaired capacity to proteolytically cleave the recombinant protein. (Gottesman, S., Gene Expression Technology: Methods in Enzymology 185, Academic Press, San Diego, Calif. (1990)119-128). Alternatively, the sequence of the nucleic acid molecule of interest can be altered to provide preferential codon usage for a specific host cell, for example E. coli. (Wada et al., Nucleic Acids Res. 20:2111-2118 (1992)).

[0221] The nucleic acid molecules can also be expressed by expression vectors that are operative in yeast. Examples of vectors for expression in yeast e.g., S. cerevisiae include pYepSec1 (Baldari, et al., EMBO J. 6:229-234 (1987)), pMFa (Kurjan et al., Cell 30:933-943(1982)), pJRY88 (Schultz et al., Gene 54:113-123 (1987)), and pYES2 (Invitrogen Corporation, San Diego, Calif.).

[0222] The nucleic acid molecules can also be expressed in insect cells using, for example, baculovirus expression vectors. Baculovirus vectors available for expression of proteins in cultured insect cells (e.g., Sf 9 cells) include the pAc series (Smith et al., Mol. Cell Biol. 3:2156-2165 (1983)) and the pVL series (Lucklow et al., Virology 170:31-39 (1989)).

[0223] In certain embodiments of the invention, the nucleic acid molecules described herein are expressed in mammalian cells using mammalian expression vectors. Examples of mammalian expression vectors include pCDM8 (Seed, B. Nature 329:840(1987)) and pMT2PC (Kaufman et al., EMBO J. 6:187-195 (1987)).

[0224] The expression vectors listed herein are provided by way of example only of the well-known vectors available to those of ordinary skill in the art that would be useful to express the nucleic acid molecules. The person of ordinary skill in the art would be aware of other vectors suitable for maintenance propagation or expression of the nucleic acid molecules described herein. These are found for example in Sambrook, J., Fritsh, E. F., and Maniatis, T. Molecular Cloning: A Laboratory Manual. 2nd, ed., Cold Spring Harbor Laboratory, Cold Spring Harbor Laboratory Press, Cold Spring Harbor, N.Y., 1989.

[0225] The invention also encompasses vectors in which the nucleic acid sequences described herein are cloned into the vector in reverse orientation, but operably linked to a regulatory sequence that permits transcription of antisense RNA. Thus, an antisense transcript can be produced to all, or to a portion, of the nucleic acid molecule sequences described herein, including both coding and non-coding regions. Expression of this antisense RNA is subject to each of the parameters described above in relation to expression of the sense RNA (regulatory sequences, constitutive or inducible expression, tissue-specific expression).

[0226] The invention also relates to recombinant host cells containing the vectors described herein. Host cells therefore include prokaryotic cells, lower eukaryotic cells such as yeast, other eukaryotic cells such as insect cells, and higher eukaryotic cells such as mammalian cells.

[0227] The recombinant host cells are prepared by introducing the vector constructs described herein into the cells by techniques readily available to the person of ordinary skill in the art. These include, but are not limited to, calcium phosphate transfection, DEAE-dextran-mediated transfection, cationic lipid-mediated transfection, electroporation, transduction, infection, lipofection, and other techniques such as those found in Sambrook, et al (Molecular Cloning: A Laboratory Manual. 2nd, ed., Cold Spring Harbor Laboratory, Cold Spring Harbor Laboratory Press, Cold Spring Harbor, N.Y., 1989).

[0228] Host cells can contain more than one vector. Thus, different nucleotide sequences can be introduced on different vectors of the same cell. Similarly, the nucleic acid molecules can be introduced either alone or with other nucleic acid molecules that are not related to the nucleic acid molecules such as those providing trans-acting factors for expression vectors. When more than one vector is introduced into a cell, the vectors can be introduced independently, co-introduced or joined to the nucleic acid molecule vector.

[0229] In the case of bacteriophage and viral vectors, these can be introduced into cells as packaged or encapsulated virus by standard procedures for infection and transduction. Viral vectors can be replication-competent or replication-defective. In the case in which viral replication is defective, replication will occur in host cells providing functions that complement the defects.

[0230] Vectors generally include selectable markers that enable the selection of the subpopulation of cells that contain the recombinant vector constructs. The marker can be contained in the same vector that contains the nucleic acid molecules described herein or may be on a separate vector. Markers include tetracycline or ampicillin-resistance genes for prokaryotic host cells and dihydrofolate reductase or neomycin resistance for eukaryotic host cells. However, any marker that provides selection for a phenotypic trait will be effective.

[0231] While the mature proteins can be produced in bacteria, yeast, mammalian cells, and other cells under the control of the appropriate regulatory sequences, cell-free transcription and translation systems can also be used to produce these proteins using RNA derived from the DNA constructs described herein.

[0232] Where secretion of the peptide is desired, which is difficult to achieve with multi-transmembrane domain containing proteins such as transporters, appropriate secretion signals are incorporated into the vector. The signal sequence can be endogenous to the peptides or heterologous to these peptides.

[0233] Where the peptide is not secreted into the medium, which is typically the case with transporters, the protein can be isolated from the host cell by standard disruption procedures, including freeze thaw, sonication, mechanical disruption, use of lysing agents and the like. The peptide can then be recovered and purified by well-known purification methods including ammonium sulfate precipitation, acid extraction, anion or cationic exchange chromatography, phosphocellulose chromatography, hydrophobic-interaction chromatography, affinity chromatography, hydroxylapatite chromatography, lectin chromatography, or high performance liquid chromatography.

[0234] It is also understood that depending upon the host cell in recombinant production of the peptides described herein, the peptides can have various glycosylation patterns, depending upon the cell, or maybe non-glycosylated as when produced in bacteria. In addition, the peptides may include an initial modified methionine in some cases as a result of a host-mediated process.

[0235] Uses of Vectors and Host Cells

[0236] The recombinant host cells expressing the peptides described herein have a variety of uses. First, the cells are useful for producing a transporter protein or peptide that can be further purified to produce desired amounts of transporter protein or fragments. Thus, host cells containing expression vectors are useful for peptide production.

[0237] Host cells are also useful for conducting cell-based assays involving the transporter protein or transporter protein fragments, such as those described above as well as other formats known in the art. Thus, a recombinant host cell expressing a native transporter protein is useful for assaying compounds that stimulate or inhibit transporter protein function.

[0238] Host cells are also useful for identifying transporter protein mutants in which these functions are affected. If the mutants naturally occur and give rise to a pathology, host cells containing the mutations are useful to assay compounds that have a desired effect on the mutant transporter protein (for example, stimulating or inhibiting function) which may not be indicated by their effect on the native transporter protein.

[0239] Genetically engineered host cells can be further used to produce non-human transgenic animals. A transgenic animal is preferably a mammal, for example a rodent, such as a rat or mouse, in which one or more of the cells of the animal include a transgene. A transgene is exogenous DNA that is integrated into the genome of a cell from which a transgenic animal develops and which remains in the genome of the mature animal in one or more cell types or tissues of the transgenic animal. These animals are useful for studying the function of a transporter protein and identifying and evaluating modulators of transporter protein activity. Other examples of transgenic animals include non-human primates, sheep, dogs, cows, goats, chickens, and amphibians.

[0240] A transgenic animal can be produced by introducing nucleic acid into the male pronuclei of a fertilized oocyte, e.g., by microinjection, retroviral infection, and allowing the oocyte to develop in a pseudopregnant female foster animal. Any of the transporter protein nucleotide sequences can be introduced as a transgene into the genome of a non-human animal, such as a mouse.

[0241] Any of the regulatory or other sequences useful in expression vectors can form part of the transgenic sequence. This includes intronic sequences and polyadenylation signals, if not already included. A tissue-specific regulatory sequence(s) can be operably linked to the transgene to direct expression of the transporter protein to particular cells.

[0242] Methods for generating transgenic animals via embryo manipulation and microinjection, particularly animals such as mice, have become conventional in the art and are described, for example, in U.S. Pat. Nos. 4,736,866 and 4,870,009, both by Leder et al., U.S. Pat. No. 4,873,191 by Wagner et al. and in Hogan, B., Manipulating the Mouse Embryo, (Cold Spring Harbor Laboratory Press, Cold Spring Harbor, N.Y., 1986). Similar methods are used for production of other transgenic animals. A transgenic founder animal can be identified based upon the presence of the transgene in its genome and/or expression of transgenic mRNA in tissues or cells of the animals. A transgenic founder animal can then be used to breed additional animals carrying the transgene. Moreover, transgenic animals carrying a transgene can further be bred to other transgenic animals carrying other transgenes. A transgenic animal also includes animals in which the entire animal or tissues in the animal have been produced using the homologously recombinant host cells described herein.

[0243] In another embodiment, transgenic non-human animals can be produced which contain selected systems that allow for regulated expression of the transgene. One example of such a system is the cre/loxP recombinase system of bacteriophage P1. For a description of the cre/loxP recombinase system, see, e.g., Lakso et al. PNAS 89:6232-6236 (1992).

[0244] Another example of a recombinase system is the FLP recombinase system of S. cerevisiae (O'Gorman et al. Science 251:1351-1355 (1991). If a cre/loxP recombinase system is used to regulate expression of the transgene, animals containing transgenes encoding both the Cre recombinase and a selected protein is required. Such animals can be provided through the construction of “double” transgenic animals, e.g., by mating two transgenic animals, one containing a transgene encoding a selected protein and the other containing a transgene encoding a recombinase.

[0245] Clones of the non-human transgenic animals described herein can also be produced according to the methods described in Wilmut, I. et al. Nature 385:810-813 (1997) and PCT International Publication Nos. WO 97/07668 and WO 97/07669. In brief, a cell, e.g., a somatic cell, from the transgenic animal can be isolated and induced to exit the growth cycle and enter Gₒ phase. The quiescent cell can then be fused, e.g., through the use of electrical pulses, to an enucleated oocyte from an animal of the same species from which the quiescent cell is isolated. The reconstructed oocyte is then cultured such that it develops to morula or blastocyst and then transferred to pseudopregnant female foster animal. The offspring born of this female foster animal will be a clone of the animal from which the cell, e.g., the somatic cell, is isolated.

[0246] Transgenic animals containing recombinant cells that express the peptides described herein are useful to conduct the assays described herein in an in vivo context. Accordingly, the various physiological factors that are present in vivo and that could effect ligand binding, transporter protein activation, and signal transduction, may not be evident from in vitro cell-free or cell-based assays. Accordingly, it is useful to provide non-human transgenic animals to assay in vivo transporter protein function, including ligand interaction, the effect of specific mutant transporter proteins on transporter protein function and ligand interaction, and the effect of chimeric transporter proteins. It is also possible to assess the effect of null mutations, that is mutations that substantially or completely eliminate one or more transporter protein functions.

[0247] All publications and patents mentioned in the above specification are herein incorporated by reference. Various modifications and variations of the described method and system of the invention will be apparent to those skilled in the art without departing from the scope and spirit of the invention. Although the invention has been described in connection with specific preferred embodiments, it should be understood that the invention as claimed should not be unduly limited to such specific embodiments. Indeed, various modifications of the above-described modes for carrying out the invention which are obvious to those skilled in the field of molecular biology or related fields are intended to be within the scope of the following claims.

The application's sequence listing, which the Patent Office published only in electronic form, follows.

SEQUENCE LISTING (4 sequences)

SEQ ID NO: 1 - DNA, 3487 bp, Human
tgggctataagaaggcagaggatgagatgtcccgggccacgtctgttggagaccagctggaggcacccgcccgcaccatttacctcaaccaaccgcatctcaacaaattccgcgacaaccggatcagtacggccaagtacagcgtgttgacatttctacctcgattcttgtatgagcagattagaagagctgctaatgccttctttctcttcattgccttattacagcaaattccagatgtatctccaacaggaagatataccaccctggtgccattgatcattattttaacaattgcaggcatcaaagagattgtagaagattttaagcgacacaaggcagacaatgcagttaacaaaaagaaaacaatagtgttaagaaatggtatgtggcataccattatgtggaaagaggtggcagtgggagacattgtgaaggtcgtcaatgggcagtatcttccagcagatgtggtcctgctgtcatccagtgaacctcaggcaatgtgttatgttgaaacagctaatctggatggggagacgaaccttaaaatacgtcagggtttgagtcacactgctgacatgcaaacacgtgaagttctgatgaagttatctggaactatagagtgtgaagggcccaaccgccacctctatgacttcactggaaacttgaacttagatgggaaaagccttgttgcccttgggcctgaccagatcttattaagaggtacacagcttagaaatactcagtgggtctttggcatagttgtttatactggacacgacaccaaactcatgcagaattcaaccaaagcgcctctcaagagatcaaatgttgagaaggtgactaacgtgcagatcctggtgttgtttggcatcctcttggtcatggccttggtgagctcggcgggggccctgtactggaacaggtctcatggtgaaaagaactggtacatcaagaagatggacaccacctcagataattttggatacaacctactgacgttcatcatcttatacaacaatcttattcccatcagtctgttggtgactcttgaggttgtgaagtatactcaagcccttttcataaactgggacacagatatgtattatataggaaatgacactcctgccatggccaggacatcaaaccttaatgaagagcttgggcaggtgaaatatctcttttctgacaagactggaacgcttacatgcaatatcatgaactttaagaagtgcagcattgccggagtaacttatggtcacttcccagaattggcaagagagccgtcttcagatgacttctgtcggatgcctcctccctgtagtgattcctgtgactttgatgaccccaggctgttgaggaacattgaggatcgccatcccacagccccttgcattcaggagttcctcacccttctggccgtgtgccacacggttgttcctgagaaggatggagataacatcatctaccaggcctcttccccagatgaagctgctttggtgaaaggagctaaaaagctgggctttgtcttcacagccagaacaccattctcagtcatcatagaagcgatgggacaggaacaaacatttggaatccttaatgtcctggaattttctagtgacagaaaaagaatgtctgtaattgttcgaactccttcaggacgacttcggctttactgtaaaggggctgataatgtgatttttgagagactttcaaaagactcaaaatatatggaggaaacattatgccatctggaatactttgccacggaaggcttgcggactctctgtgtggcttatgctgatctctctgagaatgagtatgaggagtggctgaaagtctatcaggaagccagcaccatattgaaggacagagctcaacggttggaagagtgttacgagatcattgagaagaatttgctgctacttggagccacagccatagaagatcgccttcaagcaggagttccagaaaccatcgcaacactgttgaaggcagaaattaaaatatgggtgttgacaggagacaaacaagaaactgcgattaatatagggtattcctgccgattggtatcgcagaatatggcccttatcctattgaaggaggactctttggatgccacaagggcagccattactcagcactgcactgaccttgggaatttgctgggcaaggaaaatgacgtggccctcatcatcgatggccacaccctgaagtacgcgctctccttcgaagtccggaggagtttcctggatttggcactctcgtgcaaagcggtcatatgctgcagagtgtctcctctgcagaagtctgagatagtggatgtggtgaagaagcgggtgaaggccatcaccctcgccatcggagacggcgccaacgatgtcgggatgatccagacagcccacgtgggtgtgggaatcagtgggaatgaaggcatgcaggccaccaacaactcggattacgccatcgcacagttttcctacttagagaagcttctgttggttcatggagcctggagctacaaccgggtgaccaagtgcatcttgtactgcttctataagaacgtggtcctgtatattattgagctttggttcgcctttgttaatggattttctgggcagattttatttgaacgttggtgcatcggcctgtacaatgtgattttcaccgctttgccgcccttcactctgggaatctttgagaggtcttgcactcaggagagcatgctcaggtttccccagctctacaaaatcacccagaatggcgaaggcttcaacacaaaggttttctggggtcactgcatcaacgccttggtccactccctcatcctcttctggtttcccatgaaagctctggagcatgatactgtgttgacaagtggtcatgctaccgactatttatttgttggaaatattgtttacacatatgttgttgttactgtttgtctgaaagctggtttggagaccacagcttggactaaattcagtcatctggctgtctggggaagcatgctgacctggctggtgttttttggcatctactcgaccatctggcccaccattcccattgctccagatatgagaggacaggcaactatggtcctgagctccgcacacttctggttgggattatttctggttcctactgcctgtttgattgaagatgtggcatggagagcagccaagcacacctgcaaaaagacattgccggaggaggtgcaggagctggaaaccaagtctcgagtcctgggaaaagcggtgctgcgggatagcaatggaaagaggctgaacgagcgcgaccgcctgatcaagaggccgggccggaagacgcccccgacgctgttccggggcagctccctgcagcagggcgtcccgcatgggtatgctttttctcaagaagaacacggagctgttagtcaggaagaagtcatccgtgcttatgacaccaccaaaaagaaatccaggaagaaataagacatgaattttcc

SEQ ID NO: 2 - protein, 1148 aa, Human
MSRATSVGDQLEAPARTIYLNQPHLNKFRDNRISTAKYSVLTFLPRFLYEQIRRAANAFFLFIALLQQIPDVSPTGRYTTLVPLIIILTIAGIKEIVEDFKRHKADNAVNKKKTIVLRNGMWHTIMWKEVAVGDIVKVVNGQYLPADVVLLSSSEPQAMCYVETANLDGETNLKIRQGLSHTADMQTREVLMKLSGTIECEGPNRHLYDFTGNLNLDGKSLVALGPDQILLRGTQLRNTQWVFGIVVYTGHDTKLMQNSTKAPLKRSNVEKVTNVQILVLFGILLVMALVSSAGALYWNRSHGEKNWYIKKMDTTSDNFGYNLLTFIILYNNLIPISLLVTLEVVKYTQALFINWDTDMYYIGNDTPAMARTSNLNEELGQVKYLFSDKTGTLTCNIMNFKKCSIAGVTYGHFPELAREPSSDDFCRMPPPCSDSCDFDDPRLLRNIEDRHPTAPCIQEFLTLLAVCHTVVPEKDGDNIIYQASSPDEAALVKGAKKLGFVFTARTPFSVIIEAMGQEQTFGILNVLEFSSDRKRMSVIVRTPSGRLRLYCKGADNVIFERLSKDSKYMEETLCHLEYFATEGLRTLCVAYADLSENEYEEWLKVYQEASTILKDRAQRLEECYEIIEKNLLLLGATAIEDRLQAGVPETIATLLKAEIKIWVLTGDKQETAINIGYSCRLVSQNMALILLKEDSLDATRAAITQHCTDLGNLLGKENDVALIIDGHTLKYALSFEVRRSFLDLALSCKAVICCRVSPLQKSEIVDVVKKRVKAITLAIGDGANDVGMIQTAHVGVGISGNEGMQATNNSDYAIAQFSYLEKLLLVHGAWSYNRVTKCILYCFYKNVVLYIIELWFAFVNGFSGQILFERWCIGLYNVIFTALPPFTLGIFERSCTQESMLRFPQLYKITQNGEGFNTKVFWGHCINALVHSLILFWFPMKALEHDTVLTSGHATDYLFVGNIVYTYVVVTVCLKAGLETTAWTKFSHLAVWGSMLTWLVFFGIYSTIWPTIPIAPDMRGQATMVLSSAHFWLGLFLVPTACLIEDVAWRAAKHTCKKTLPEEVQELETKSRVLGKAVLRDSNGKRLNERDRLIKRPGRKTPPTLFRGSSLQQGVPHGYAFSQEEHGAVSQEEVIRAYDTTKKKSRKK

SEQ ID NO: 3 - DNA, 559686 bp, Human
  misc_feature (1)...(559686): n = A,T,C or G
cacaaagaggctgctgacctctgagcctccttagcacctttgggcccactcttagtcacacactggtaagtaaccatggttacacctttatgccttaattgagggaacattttcaagggcaggaacctgatcttctgtttttgtgttctcagcggcatctaacaagtgatcctgactgggtgctcatcagcatcacttagtgatctttagaagcaaaacacagtgaccacagaatctgagagggcagggcccgggaactaatacattgtggaagctgcattggtaatactaatgcacaggggaactgagagccgctaggtgagcaatgaaccactttgaccacgcactgttcagtgaacccagcctgtccctactgtcctggagcttgggcttctgggtgcagtgagacagagcatccataaataaaatcaggtaatgatgatatctggtactgtggaggaagacaaggcagggttagtgggcagagagaaaagcagtacttccatataggctagcttcaaaaatattctccatctgtcttacatcagcaaatgctccaacacctggccttccctgattgaagtccgggagccccagctggtgggccagacagtctggaagaagggattcttgctctctgctgccgcttgttgatgagtagacgaccaagcagtgtcccatggggagccagaaagaccccagagagtgggaggttggagggaaggagatgagggatcctgtctgagtgaggaatagccagggtgctgtgggcacacgcaaaaagcaagaggaaaactggagtgtgcctggcctgtgaccagggacctggcttgagccccggagcctgcacccactaggcgtccccatctaggtgaagggagaagccttagcccacttcagacttaactcttacttaatattcggaataatatgtcagctttcagtaaacgagtttacatttcgcttgtccctttcttaggataaggattatcatccttctaatcactttaaaaagatgatgtagcgaaaactttctctttaaaagtgtttctctatgacagtgaaaagtattctttgtaacagggaagtgaaggtttacttgcgtaagatgtcagtttttttttttttttgagacgagtctccttgtcgcccaggctggagtgcagtggcgcgatctcagctcactgcaggctccgccccccggggttcacgccattctcctgcctcagcctcccgcgtagctgggcctacaggcgccctccaccttgcccggctaattttttgtatttttagtagagatggggtttcaccgtgttagccgggatggtctcgatctcctgacctcgtgatccgcccgcttcggcctcccaaagtgctgggattacaggcttgagccaccatgcccggccaagatgtcagttttttaatggtgtgcaacgtccgtttctttgatagttggaaagcgtggcaggtattagagggcgaatgtatatttaagaaaaacaagataagtcttcatctgtagagtattaatttttctgtgatcctttatctcagacgcctctcctctgaaggtcactgctcaagctgggcagccccttctaagaagggatgctgccttggagttggagatgaggttaagatctacgtgcgggtaccagtttcagtaataactggatccttctctaggtctaggctggaacgtctcaagtgaaggttattggggggcaggggtttgggtccacccaaaaaggcttgacccataggactgaaatcaaatcttgagctaggctggcttgccacgtaaccacagaaacagtaatttaagcaataaaatgaaagctcgagcgctggtccagagctggggttgggacagctactgcactcaggtctccaggtgcatgtagggagaagagcagcggatcccttgcagacaatggtgggagcgagctcttcaccctggggtctccgaagcccatttttagcgtccagaggtgtgctttcgccatctccttctgcggtggctgcttgcagggcgcattcccattgctgctgtctctgttcctaaggaagatcaaaggatcccagaaaacccagttccagagctcagttcccgggatagagggtacgctcggccagatgatggctgggggtgccgctggccttggcgcccccgccgtccccgcgcggtcgcccaccccggcccgacaagcagcttgggcgtccagcccggcccggtccctgcagggagggagcgcaggagctgggggcggctctcccggggcggggctcgatccacaagcgccaggggccgcgcggggcgtgggcgtgggcggggccgggggcggggccggccttggctgccgcggcacaggcggcggcgtctccagggggagccaaggtacgtaggcggcgtccgcctcacccgagcatccttccccgccggtggccgcccgcccgcggcccgcgctcgcagcctcccgcctggcggttgacttctttgtgtcgtattctctgcctgcgccctgtctctgcaggacctgttcgttcttctttgggctataagaaggcagaggatgagatgtcccgggccacgtctgatggagaccagctggaggcacccgcccgcaccatttacctcaaccaaccgcatctcaacaaattccgcgacaaccagatcaggtaggagaaggcggccggctcgcgcggtaaggcggtggagtcacagctgggcaaggggctcgtcctcctgcgcggggcttggccgcgcacctggccggcccccgtccatctcccccagagccttcccctgccccctccccaccccactagcccgcggtgcagccccgcgcttccagtagggtcatgcgaatgcagccctcaccgttctctcctgcgcatccgttctgcgcccagcctgcctctgagccctgagaagttttcactctaatgtcaccgacaaaaacgaggtctctgctcttttcatccctgggcttccttctcggaaccccttctagccttgttttaagccagttgatagccttctttagcaatttttagaccatactatgggggacgtgcttcataagggaatcccacaagtcacaaggaatcacattcagttctcagtggtccacgacaattgttaagaggtcttcatttgctgcgaaactttgcccagagttagcagaaagatggacagaagctagcgtttaaatgtctacttttgctggccgctatgtcacacaccctggctatagcagcttagtgaatcttcataacctattgaagcaggccaggagactggaatataaagatgctaaataatgtacctatagtcatacagctcctaaatggcagggctggaaattgaacccagcccatctgactactaaggataaaattttttctgctgtgcaaagctagttctttatcacgggtgttcgtacattttcaaatttcattaaactttcaggcttaaacaactttgtatctgggagagacttcagaggatgtagttctgtgagctgctcagaacaccatgcttgggtgtagagaagttcagtgatttatcaggttacacatagattattgacaaacctgagttccaatccagtgttcttttttggaagacaaaaactttgttgttatatgtttaagtattccactactgcactaacacttgtacaaatgacttagcctgacatctttatttagaaaggtcaggcagttggacattattggggtagaataatggtgcatattatatggaggtggaattttcacttattaaaggagtgttagattatgcagctttattttgggttttaagaatgacagttgggcatattttatacttaaaagtgtaatttagaagaatagctgagtccccatttcagaatgtgtgggcttcgtttaagatacagagcatcagtcgcagtgagttaccacttcacaaactagggtggctccaatcaaaaagacaaataacaagtattggcaatgatttagagaacttggtatcctcatgcattactgatggggatgaaaaacgatggagctgctttggaaaacagtaaaaatgatggagctactttggaaaacagtttggtagttcttcaaaaggttcaatgtaaagttaccatatgacctagccgttctactcctgggtaatctgcccgagagaaatgaaaacctacgtccacacaaaaactcatacacatatatttcacagcagcattattgtgaatagccccaaagtagaaataatctaaatgtccatcagctgatgaatgaataaataagatgaagtatatccatacagtgcaatattattgggccataaaaaggaatgaaatattgacacattctacaacatggatgagacttgaaagcattatgctaagtggaagaagccagtcacaaaaggcctcatagtacatgattccatttatatgaagtatccagaagaggcaaatttatagagttatgaggtaaattagtggttcctggggctggggaagagagaaaaggttggggggaaatggggaatgactgtgaatgtggatggggtttcattttggggtgatggttgcacaactctgtgaatttacctaaaccatttggaatcctgcactgctcatgtagttccatttctttacaccttctcgcatgtgtttctattgaattgctttcaaaaagatgattttctaaaaggtatatactgtataaggatatgggatttgaagagctacttttctttttaaactttagtgtgttttcaagatgtatttttgcttaatttctattaattcctttaattttgttatccatttatgcatgcttaaggctgggagaaaaaaaaaatagaggcctttgtttttgtctaaattcttttgttttaatggaaggtaaagttttttttttttttggagatggagtcttgctctgtctcccaggctggagtgcagtggtatgatcttggctcactgcaacctccgcctcctgggttcaagtgattctcctgcttcagcctcccaggtagctgggattacaggcgcctgcccagctaatttttgtatttttagtagagacggggcttcgccatgttggccaggctggtctcaaactactgacctcagaggatccacctgcctcagcctcccaaagtgctggaattacaggtgttagccaccaggcccagctggaaggtaaagatttttaagagcactgataatggagcttcactacctgttctgtaatcaagattgaaagctgacccagactgattgtattattagtcagagggattccgagtagctgtctgctgtgcagtttcatctgtactgttttgagagaggcagagtaagttggggatgtacagtgggttggtgaggaataaagtagtcagttaccagctattgtattgaaagctttatgtaagtatataattgaattagttgaaatatattaaaattcatataatttctgagttcatggcttatactgtgagcgtaagtttccgcatgcactggatagggtctaagaaattaaaatgtggtccttgatgttctttaaaatggcctttgagtatttggttcgccttgactctgtgtttaaataggaattactaatggttatcagtgacttgtagttcattaaaaaattggttgtaggccagatgcagtggctaacacctgtaatcccagcactttgggaggccaaggtgggtggatcacttgaagccaggagtttgagaccagcctggccaacatggcaaaaccccatctctaccaaaaatacaaaaattagccgggcgtggtggtgcttgcctgtagtcccagctactcgagagactgaggcacaagaatcgcttgaatccaggaggcagagattgcaatgagcccaaatcacaccactgcactctagcctgggtgacagagcaagactccgtctcaaaaaaaaaaaaaaaaaattgattataaagcttcttagcattatggtttaaggatttgagaaaacgtcgagccatattattttagcactttaatgttactgaactcaagttttatgataatattgatttttaaaaataaggccttttatcttggccatgaatgtttgctaaaagttaatgaagctattcaaaggaatatttttataaaaggataaataatttgttttttaatataatttttctggagaaaaggttaatggttttcttagaggcagggcatggagagtttatcccagttcctttgcccctaaattgagctttttgaaaagaagggaccacatgggatagatgaggctcaggcctgtctgctgactcagggctaacttaccttgttgtactccttggcaggcctgtcctctctggaacagagttctctcccctactttcctcaaccctaagctggttttggtttgaaaccctctggatcatagcagttgctctgcgcttgcctttctgggaagctggcgtttgactaggaatgggagtttgatacagaggaagggagggcagcgaggggcggcatgctgtcattcaggacaggaattctatgggtcaagtttactggaatggaattgatgtgactgaagaaagagggtgggtctggggaaatgcctagaaagcaggagtgaggtcccctctgaggtccattgtggcctcagcacccccaggggtatgcactacatgagaactctgaattctggccaattccttgaatttttgggagggactgtgctatgtatatagatgtctcaccaaaccttgttctcattcttgacggtgaaaataccaccagtgtttgatctgaagtctgtggtaggtttattaagtttttcattattgaagccaatgaattcagattatcataatgatggagaattatgaagtagtctttttctactagggattgattttctaggaccttaactatgagaacaataactttcttcatcctctggaaatgaatagtaattaatgggattcaatgtttatatacatatgtaagattatgtatgtgtccacctaataagatctccttttcctggagtgtacaatcatatctcctttcaaatgttttaaaggttttagtgcacaattcagccatctgaagtatacaattcagtgatttttaatatattcattgtgcaactatcatcacagtcaattttggaacattttcatcacctccaaaagaaatattatactctagctatcatctcccatcccttcctccccccacccctaaggaaccacaaatttactttatatttctgtagatttccctgtactggacattttgtataaatagcctcatatccttttaagttaaatattaaatgcttacaaaagctcactatttagaggaaactggtggtgaatttttaattttatatatctaaattttcaagaatgtttaaagttaaaatgtttttttcccccagaaaaatcttgaaataatgtgctgatcaaaggaatgagcaatacttatgtcatcactatcagacatatgtaatctttctatgtgattagcagcatgccatttgaaatagtgaatttcaaagccataaggcagttttcttcaatatttgaaatgaggtcttcaaagctagttaggaatgtttatagttactcagttttgaatgactcattcatttcaggtgggcgttttagctagcaaaaacttcattacagtggtaactcgagctttgtcaagttactgcatttcttcaggttggtttgccttaaaggaaattacttcatacaaatttttggtaagtttttgttggctttgccaaggttaattttaaatagaatattacctttacagggccaggcgcagtggctcgcgcctataatcccagcactttgggaggccgaggtaggcagatcacgaggtcaggagattgagaccatcctggctaacatggtgaaaccccgtctctactaaaaatacaaaaaaattagctgggcgtggtggtgggcgcctgtagtcccagctactcgggaggttgaggcaggagaatggtgtgaacctgggaggcagagcttgcagtgagcagagatcacaccactgcactctagcctgggcgacagagccagactctgtctcaaaaaaaagaaaaaaaaaaaaagaatattacctttacagaaaaaggaaattgagcactgtatgctaggttggtacagtatcattgtttataatattaatgctgagatcctaattttttttttaaccttgttttttggttgttttgttttaatttatattttaggttcgggatatgtgtgcaggtttgttatataggtaaactcatgtcataggggtttgttgtacagattatttcatcacccagatactaagcctagtactcaatagttattattattattattatctgagacagaatctcattctgtcgcccaggctggagtgcagtggtgcaatctcggctcactgcaacctcttcctcctgggttcgagcctcagcctcctgagtagctaggattacaggcatgtgccaccatgcctggctaatttttgtatttttagtagagatggagtttcaccatgtttgtcaggctggtctcaaactcctgacctcaggtgatccacccgccttggcctcccaaagtgctgggattacaggtgtggctcacacctgtaataggccactgtgcccggcctcaatagttattttttctgcacctcctccttctcccaccctccaccctcaagcaggcctcagtgtctgttgtttccttctttgtgtccatgagttctcatcatttagctccctcttgtaagtgagaatatgcggtatttgattttctgttcctgtgttagtatgctaaggataatggtctccccctcattccacattcccgcaaaagacatgatctcattcttttttatggctgcatagtgttccatagtgtatatgtacattttctttatccagtctgttgttgatggacatttaggttgattccatgtcattgctattgtgaatagtgcttcagtgagcattcgagtccacgtgcctttatggtagtaggacttatgttcctcttggtgtatacccagtaatgggattgctgagttgagtggtagttcggttattagctctttgaaaaacttccaaactgcttttcacagtagttgaactaatttacactttcaccaacagtgtgtaagtgttcccttttctctgcaacctcaccagcgtatgttatattttggctttttaaatagccattctggtggtgtgagatggtactcattgtggttttgatttgcgtttctctaatgatcggtgatagtgagcatttttttcatatgtttgttggtggcatgtgtgtcttctttagaaaagtgtctgttcatatcttttgtccactttttaatgcggttgttagtattttgttcttataaatttgtttcagttccttataggtgctggatattagacctttgtcagatgcatagtttgcatatattttctcccattctgcaggttgtctgttcactctgtttgatggtttattttgctgtgcagaagcccttaagtttaattagatgggatcataattctaaaagaatatttttgtcttaaggagtaaaaagaacaaaataatcttcagtaaccaatttgtccatgaatagtggggagagattatatatgtggtactagatccaatgtcattgagtactgtgaggatgaagaattctcctctaaatgttttaatgctgcagaatttatgtaggatctggtcttaatgcacaagctgcttacaatttagcaaagaagcaataccagcatcctagttagaatcataacttttttttttttttgagatggagtctcactctattggccaggctagagtgcagtggcgcgaactccactcattgcaaacctttgcctcctgggttcaagcgattctcctgcccctcagactctcgagtagctgcgattacaggcacccgccaccacggccagctaatttttgaatttttggtagagaacggggtttcaccacatgggccaggctggtcttgaactcctgacctcaagtgatccatctgccctggcctcccaaagtgctgggattacaggtatgagccatgacgcctgacagaatcataacttttttggtttatgtaaagatcattatcttaaaaaccaaggttatgtaatctctgatttgagactgctgtctttatcaagtttggcaaaggtaaaagtattccttatcaagagtaattgctgatgttgaaaacagtctcaagattttccttctgggtatgctgctttttgtttagaagtggatatacttggttaatttccaagccaggcactgtactttctgaacgtgaatggcacaacaatcctgagttcttattttcgatgtaccagcagcaattaatgccatagaagagtcttgtaatgagaactgttatcacctttacacccctggacaagtcttttgaggaatcctgcagacgaaaatattggaactgggggagctttggcatagtacattccaggtaaccattgaatgtgtgagctttcttgaagagtatttttagaaacagaaaagcctgtcagcattgggccagttttatatttggtgtttctaaggaaacagcaaatgtctaagaggacagactttcatgggtgatttctttatcaagttgacccctgtgtggggtggataatggagcccagtttgaatttgaccaaaaaaaatctgtgccatttccactgtttaaaataggtaaaagcatttggtttgagaattttggtcagtaatttatttcccctctctcctcttcccaaattctgttaactcttattgtctgctgtgaacttggaagcatttatgatttttgattaaaaagaattaagcatcaggatttgtgagacaaattaaaactcaaccagaattggaagagacccaagacgtgacaagtaagtactgtgtgggtccctgaattggattctggaacagaaaagacattggtggaaaaactggtgaatcttgaataaagtctgtaattggattagcattgtgccagtgttactttcgtagttttgacaattgtgctatggtgatgtaagatgctaacattgtggggaaactggacgaaggatagatgtcaactctattatttttgcaactcttctataagtatacagttttcggccaggtgtggtggctcacacctgtaatcccagcactttgggaggccgaggcaggcagatcacctgaggtcaggagttcaaggccagcctggtgaacatggtgaaaccccgtctctactaaaaacacaaaaattagccaggcacggtggcgggtgcctataatcccatctactcaggaggctgaggctggagaatcgcttgaacccgggaggtggaggttgcagtcagcagagatcgcaccattgcactccagcctgggtgacgagagtgaaactctgtctcaaaaaagaaaaaagtatactattttctcaaacaaatcttaaaatcaactagaagtatctgagagaataggaatgaaatgctaaactcttgtttttctgttgaatactttagtaaatgtttggatctttaattggaaacatacatgattttgaagggaggatggtcagaagaaaaaaggatcagtatcttcatatgtttgttgtgatgagtagatgggaaaacccttactctcggggcatcaaagaacattccctatgctcacaaacagcaccaagggtttgtttgcataatgtctgatctagttgcttaagttgaaaaagtaggtaacaaagtagactgctctgtttttgctcagtttagtcatgtgagcttctgtgtcgttatccagaaagttgcatctaagtgtttgttctactacttatagctgagtcactcaacagacagcaaaagcttactcagaaatgctaatcagcaaccctttcaagagggacaatgcttagacagaacaaaaggagaggtctgaccattgtggggatgtagggatgtttaacaaagaaatttcctgaaatccatgaggttgggtttggtcattcaaatgctgacccattcttttctcttaaatgaaagccagctcttcaaaactgaaatcataggtttttagcctttactattttatattagatgtcattaaaaatgatttggggttgagtttgggatgatgttagtcactctgatggattattctatgtatcttcagtctacgtataacatataccatacgaaaggcttttggagagtgttggcaggtttcagcttagaaaagacttcagcttgagagtggacctaactctcatgtaagttctctgtctatatcagtggtctccaaaactttttcattggatgtcccatttgtaacactttttttttttctttttggagtcttgctgtgtcaccaggctggagggcagtggcgtgatcttggctcactgcaacctccgcctcctgggttcaagtgattcccctgcctcagcctcccaagtagctgggactacaggcacgtgccaccatgcctggctaattttttgtattttagtagagacggggtttcaccattttggccaggatggtatcgatctcctgaccccatgatctgccctcctcggcctcccaaagtactgggattacaggcatgagccaccacacccccagcccataaaattctttagcatgaacctttgatatgtatatttaaaacattggtatacatgtgctatcattgttagttattatctgaagacccagtacatatttaccaagattctccgttaaggattatggatgtaagtacatattgttcacagtcttctctattattttgaatgcttttggccgatttgtcagatttgattaaattaccctaatgtttaacctagtaaaatggttttaaagagcttttactaggaatgtaagtgtcaattctgctgctttttattttcttgtaattgcattattaataagtataatttccaatttgtggttttgttgtatgattcttttatttttatttttatttttattgatcattcttgggtgtttctcacggagggggatttggcagggtcataggacaatagtggagggaaggtcagcagataaacaagtgaacaaaggtctctggttttcctaggcagaggaccctgaggccttccgcagtgtttgtgtccctgggtacttgagattagggagtggtgatgactcttaaggagcatgctgccttcaggcatctgtttaacaaagcacatcttgcactgcccttaatccatttaaccctgagtggacacagcacatgtttcagagagcacagggttggggggtaaggtcacagatcaacaggatcccaaggcagaagaatttttcttagtacagaacaaaatgaaaagtctcccatgtctacttctttccacacagacacggcaaccatccgatttctcaatcttttccccacctttccccgctttctattccacaaaaccaccattgtcatcatggcccgttctcaatgagctgttgggcacacctcccggacggggtggtggccaggcagaggggctcctcacttcccagtaggggcggctgggcagaggcgcccctcacctcccggacggggcggctggccgggcggggggctgaccccccccacctccctcccggatggggcggctggccgggcggggggctgaccccctacctccctcccggacggagtggctggccgggcagaggggctcctcacttcccagtaggggcggctgggcagaggcgccccttacctcccggacggggcggctggccgggcggggggctgacccccacctccctcccggacggggcggctgccgggcggagacgctcctcacttcccagactgggtggctgccgggcggaggggctcctcacttctcagacggggcggttgccaggcggagggtctcctcccttctcagatggggcggctgggcagagacgctcctcacctcccagacggggtcgcggccgggcagaggcgctcctcacatcccagacggggcggcggggcaaaggcgctccccacatctcagacgatgggcggccgggcagagacgctcctcacttcctagatgggatggcggccgggaagaggcgctcctcacttcctagatgggatggcggccgggcagagacgctcctcactttccagactgggcagccaggcagaggggctcctcacatcccagacgatgggcggccaggcagagacgctcctcacttcccagacggggtggcggccgggcagaggctgcaatctcggcactttgggaggccaaggcaggcggctgggaggtggaggttgtagcgagccgagatcacgccactgcactccagcctgggcaccattgagcactgagtgaacgagactccgtctgcaatcccggcacctcgggaggccgaggctggcggatcactcgcggttaggagctggagaccagccaggccaacacagcgaaaccccgtctccaccaaaaaaaatacgaaaaccagtcaggcgtggcagcgcgtgcctgcaatcgcaggcactcggcaggctgaggcaggagaatcaggcagggaggttgcagtgagccgagatggcagcagtacagtccagcttcggctcggcatcagagggagaccgtggaaagagagggagagggagaccgtggggagagggagagggagagggacagggagaggaacaggaacagggacagggacagggacaggagtactggtcttcatagttacttcccaatattgtttttgcccacattttctgatgggacatgcagactgcatttcccagtttctcttgtaactagcgactgtgtggccaacttcaggccagtggtctctcagaagagtcacatggcagttctaggagccctcctgagactcaacgcccatgcatccttcattcctcctccatcctgagccaggaatgtggatgcctgtatgattcttaaaccatttgttcttttgggagggttaatttagtttaaattggataaagtgatggatgactccacctagctgggacctggaaattgaaatgtgtagtagtaaggagagagacagacagggagggtaccactgttatccctgtattagctcaggctgccatagcaaaatacatagactgcgggggcgtaagcaggtgttcgtcttctcatagttctagaggctggaagtccaagatcagggtgccagcatgatctggttctggtgcgggctctctcctggcttgcagatagctgctttcttgccatgtcctcccagaacagagagagtgagcaagagcaagagcgagagtgagggagagacagagtgagagctctctgtctctaataagggcactaatcccatcttgagggtcccaccctcatgacctcatctaatcctaattatctccaaaagggcccaacagtagcatcccatcacattgggggttagggcttcaacatatgaattttaggaaggacacagttcagtccatagcaccacccacccttcccattaaagaggttcctctccagccacattacatagaattacgttgggacaccagtgtcagtgcatttaataaatgttcctgaagcttattttttggaggtatatataaatataagctctgatagcatcttcccaaaccccacttggaagccacctgctttagattcagttgattagggcccgccttagaggaaaaccatctggtcagacccagtctgacttttactttaggccccaggaactctgagactgatcataagtcttgttccttaagtaccattcataatcctacatttggtatatgtgaggtaagcattgcagtccctctctgtcaagaattgggggtgcgtggttagtggcagcactgcaggggtgggaaagtagaaggacggggcaaaactgctagtagagaccaatgagctgggcctgaaagatgagtacgagtcagcctggaaacttgggtggggcttggtggggagggcaggccagacatggggaaccccatgtgcagaggtgcagaagagtgtaacggccaggtgtatgtctttccagaaaagatgtggaagaagaaggtgatgtggtttggctctgggtccctacccaaatctcatcttgaattgtagctcccataattcccatatgttgtgggagggacctggtgggaaatgattgaatcatgggggcggtttcccccatactattctcgtggtagtgaataaatcttatgagagctgatggttttatcaggggtttccacttttgcatcttcctcattctctctttgcctgctgccgtccatgtaagacgggacttgctcctccttgccttccaccatgattgtgaggcttccccagccatgtggaactgtaattccaattaaacctctttcttttgtaaattgcccagtctggggcatgtcttcatcagcagcgtgaaaacggactaatacagaagggatgatggacaaagtgctgtgaaaggccaggctactggagacgggctgctatagccaagaaaagcttttatgagccaggtgacaaagtgatagatagtacttgggtttgatgtgcacagccacctgctctgcatttagaataagcatatgaggctgctgtcattgcccaggaagaggtgcagggctatactgctgcaggagaagagaagcacttgggatggttagcagtggggctgtaagtggacagagcactaggcaagtgtgatttccaggttccagtgttagtgacggagaaggtgttgatgctgtttcttgtgtttctgagttttgttttgaactattttgaactgtggaatggggcaaggtgattgacctcagaatagcagaaagcccctttcaccccagtatgagaccaccccaggggagcagagatacacatgtagggggtgatctctgttggttgcgtcatgaaggagctccttcctccagcaaggtaggggcagcactggcgctcttggagagacaccaaacttttgacagatctttccctacctctagatctgtttggtttcaagatactccaattaataaactggaagtagaataatgtcatagcttacagcatgatgagaattaaatgagaacatctgggcacagtggctcatgcctgtaatcccagcactttgggaggccaaggcaggaagattgtttgaggctaggagtttgacaccagcctgggcaacatagtgagatcctatgtctacaagaaaaaaataattagatgagaatgtacctgtttaaggctgcactgtgtaagagctcacagactcacacagagttgctcattgacaccagttatctggttattacgaatgttgttcttctttgccactcattttgctctctaattctttgataaccaaaacaatcaattataagctgtaactcggggaaaagggaagtggacttgcgtattactctgcccaagagttacacattgccaagggaagaaatatgcaggctgaagaatcacaaggtaggttttgggcattagggtcttttgtacatatatgttttctagcctgtaactgctaggaacaagcaggctggactgcgagcataagatgagtctaaaatgtgtttgagagtgcatgtgtggattggtgttaaatcaagaaactggcttctccttttggtgtcgtgaaagaacacagttgcatataaattcacattaaattcactgacacctcctcctgcaaacaaacaccaaaattctttatgatagaatggttaaaaccttaaacttggtccacatgtatgactagagttgtattgaattgtgactataaagtctgcatctgtatctttctaccctccctccttttttcccttccatcttgtttgggaccatcaactttttggctctgtggggctctgctttgaatatctctgaggaacttggcactgtgcataatatggaaactgaatacttaactgtagattcaatgatataaaggaatattatttatttatttatttattttaaactttttctttttttgagacagagtctcgctgttgcccaggctggagtgcagtggcgtgatcttggcttactgcaacatcccactcccggattcaggtgattctcctgcctcagcttcctgtgcagctgggactacaggcgttcaccagcaggcccggctaatttttttgtatttttagtagagatggaatttcactatgttggccaggctagcctcgaactcctgacctcaagtgatccgcctgcctcagcctcccaaattgttgggattacaggcgtgagcgaccgcaaccggcaggaatattctttaaattattgaataaaaaatatgacacttttgtttttattccagtgaaaggtggaagttttgaaagtattgctgtctagcatatgaaacacgttaccaagctctgacagtttaaaaatagagctctttattttaaaacagtaaggccatttgctgaatagtatcacaattatttctctagtactcagctttgttaaaactgcctcatagtcattttttaatgttacctttacaaattagaattcattgaccattctaacagtgatgtaccagagtaaactgaataatttcacataatgacgatgccgtggtaaggcagaaacatgaacttctctcagtatcactgttttgactgtcagctgtcatgcagtttcaacactacacctatttcaacaaagttttgttcactgtataagattagacatagcagaggaagtaattttaagtacaggatagtgcgtgtgtgtgtgtatgttggggaggtaccaccattattctctgtacatgggtcagtcatatttgtaagccaaacaatgtggacattggaaagtcaaaaaactccaagacagaaaacaacataagggaagatttcttttcatacttttaccaacctccttccactgctttatctaaatgtgtacacacataggcacatgccatatcttttaacgcttataattcactgggcctacacatgaacatctgtcttcctgggggacacaccatttcacctggaaaaccattctagtccacagtgagctggtgttgaaagttcttcctctgcatcgaggcttcctgtgagtcccagatgatggttctagactgtggccgacgcataagtggcagtcgacccataacaactgcaaacatgtttaattactataacaaaacgttaattctcacattatatttgagttagtattggactgtcaggaatttagtagttctcttaatgtttagtttgatagtcacagacccatttatagagatgactcttcaggactgccccagggagcatatgtgacctcttcatatgttgttgggtgttctatcacattgttgggaaagagtgagttttcttatttcaccaattgacaacattgctcctatactcaacaaaaatttaaatgagggttggaaaagctttcaattttttgcccctaaaattgtacccccaaactccagtactccatattagtatgtacgaactctgaggaaatgctgagaaagctggagactatctgttacttgctgacagtcttttcctgtgtctagttcactttctgaggtccttctgtgtctagttttatggtccctttgctagtattttgtatggatggttgatgggtgcaatgtgcaatgcagtattccaaatattttttttatcatgtgtcatgcacttaagtagacaagaagctattttcaattcagtgctggtgtttgccatagagttaaatacgttttttatagaaatcaacctgtgatatttataaatattttagaagagtagattataagaaagttaactgacttggattttaaaccatagtactttttatataaatagtttaaagatattgatttagcattcttcacagccaagtatgttttcttatatatcctgaagataaatttattatgtgccatttttttgaactattgtgttaagggacatgatgaattttgatattttgagatacaaccattagaaaaaaatgaagagagtctgaatatgtagccctttaaaagaaacttatgtgctgcttactgtttgaaatacattgaatattttaaaattaggacagcatcaacatggctccacatatacccgtggaacaattgttacaacaaatagaggctgggcatggtagctcacacctgtaatcccagcactttgggaggctgaggcaggtgcttcgcctgagctcaggagtttgagaccagcgtggggcaacatggtgaaaccccatctctatcaaaagtacaaaaaattagctgagcatggtgatgcacgcctgtggtcccagctacttgggaagctgaggtggaggatcgcttgagcctggggggtggaggttaaagtgagctgagattgcaccactgcactccagcctgggtgacggaggaaaaccctgtctcaattaaaaatattaatagtaataatataacaaatagagctgtggttgagttatgcagaagtgatgagctaagatgtattatctgcttagtaagacttgaaagacagtctctaactaaaaaggtgaattgtttgtaaaacctttttgccaaggtttatgttctccataaaattctcaaatacaattttgcggagtctttgcagaatgatgtcagtgctagtatttacttttgctttccagttctcgttcgtggcatttttgtattccacaggctgtcatgtacctctcatttcctgttttgtgcatataaaggtaacttggttggcgaatcgatgatatatagatcaggtattttatttttagccttccattgcataagaaaaatctaggttcatttcgtctggggcaggctctgatttctgtttgtagccagcactcctggtgattttgctgaaggcggtcctcatttgttgtcaccctcatgcaacaatgtatagttcataggaattttttgaagattaaatgagttaatatgcatgaggcactttaaacagcacctcactgagtgctttatatattttgctgttgctgtagttgcattttagatagtgtgtttgacaacaactctcccatcaattttggaatgtaccacttgggttttacaaaaaaaaccaggtattgtcttgtattagtagagattaaaaggtaaggtgcatatcgaataggatgaatgtgtttcaggaacaaactagaaatgttttctttttgcactaacctgattttgaagattaattctagtttgcctgaggttatcatggagaactttaaattattaaacatgtaatggaaaaaacatgcagtgtaatctttctctctttctttctttttttttttgtaatagcctgagtgggagggtaattagctatagtataaggaacaaaacataacaagtacatgagtcttggctctaccagggaccaagtgaatgaccttaggtcaagtccatgatttcgctgagtctgactttccttgtttgtttgatggaaacacacttccctagaaagcatgtcgggaagctaaatgagatttcagatgcaaaaatgcctaggacacagtacagtggccgtggatatcgtatatcccttcctgtttgacaggttgggtaggcttgttgctcttttttctttcttttttctctttattgtggtaaaatacacataacatgaaatttatcttctttattatatttaagtatacgattcagtagtgttaaggatagtcacactggtgtgcagccaatctccagaaagcttttcatcttgcaaaactgatactctgtccctgttaaacaactccctgttcttcctccccgtgcccctggcagtcaccgttctactttctgtccctgtgtatttgacttctccaggtccctcatgtaatagtcttattgctcgttgatatagtaattacaactttaccattacaaggagtcttgcctgggcatggtggctcatgcctgtaatcccagcactttgggaggctgaggtgggaggattgcttgagctcaggagtttgagaccagggcaacatggcaaaaccctttctttatgaaaaatacaaaaattagccaggtgtggtggcatgcgcctgtagtcccaactacttgggaggtggaggttgcagtgagccaaaatcatgccactgcactccagcctgggcatcagagccatacctgtctcaagaagaaaaaaaccaaaagcagtcttagtactctatcacacggtcatttttggtggtgtttttgtcctttttctatgctttatctcatgtcttgctgtgtaccacagtaagcaccactttttaaaaaataggtataaatgattaaaggaaattcagatgactcccccaccccccaccccccatttttgctgtctggttgactttaccatttgcatctttccctgacaaccctggctaggttgggatacaccaggaccagggtacagagtcatagtgcccaggaggacgcttgatggggtgggtatagattttaaaccagatctgcttttttgttgagtggattgttttcatggcactggcgctggttcagtctctcgtgtctccacctgtgacagagtttccctttcaccttcccgattgctggtggttatcgttctaaaacagccaaggcactgtgattctccctgttgagggaccatcgctgcttctcttttgtctccagtaagatacacaaggccactctcgttctattcccggcttaccgcaccatctccccaggctcctcttcctgtgtctggctgcagcctttaatcacggcactttccctggaacactgtctcctaatctactcaagttcgtcctcctggagggccctgtttttcaggctcaggttgcatctctgtaagcaagcattttcttcctcgtcctgcatctccaccgtttgcaggcggaggcagcccctctgtgccgcagcgtttctcagactcttttgctctggaacttagcatgctgcaccacatctatttttatccatctctgactctcctgctctgctgtgtcatccttgatgacaaagtctgtctgtttcccctcgcatcctccccagcacgacgcacagttcctgccaatgggaagtggaaaacctttgctgaaggactgcgctctgcaagcgaaggtcagaattgaacagaaaatgagaattggcttaatgtgttgttctcagatatcccttcacacttaattgcttattgaacaaagtagaacccccatggtgatgtgcagttacttatgcctcggaaattgatgtattgtgtagtgttgatgttgtactttcatatataaactactcctaaaagggggctgccgaggtaaatgcttttaatgccaatttcttcagacttggcagatggatatctaccctcaaatggaggtacatttgggatttaatgtgacagctggcatccttagtcatttatgttggtcaaggtttaaaacttgtgtgttcaacaaatttttttatggtagccggtgtatactgtcttggtgcttggtgttgcagcgcagtggtggaatatcgagggctctgcctgcaaggttactccttagcttttcgggtatatttgagtaagggaagtgtagtagagaacacacatgttgaatgatccatttccatggctaagttcgtggcccctttttcctcctgctctctggctcatgcccttagcctcttaaagaagagttacggaagagaaactccgagcagcctcctggcctgtttttcctgagccgtaaggtgggtgcttcactcttcacagggctagccccgtatagctttaattcccacagcactttccttagaagctctcctcgcggagcacagcacggacgggccaggagccggggctcccatgcctgaagctgctgtcctccaggagcctcagatgtgaggcagagccagtcccagctggcatctccatggcacagatgaggaaacacaccagaaagagttacataacttgcctgagttcctacagtcggtgagcatcacaggctgtgtgggatgcattagggagtggtctgcctgaagtgcaggcaataagaaggtccacacaataaaacccactaaaagtccatctgcttttaatcatctccgtgtaccagcagtaacattctcctccctgcaaaagccttcttttggactaaattctaaataattgccgtgactactaattagtttttttgtttttttttgtttgtttgtttgtttgttttttgttttttgttttttttggagaggaggtcttactctgtgggccaggctggagtgcagtggtacagtcatacttcattacagcctcaaattctcccacctcaacctcgtaagtagctgggaatataggcacacgtcaccatgcgtgactaattaaagaaaaaatttagagggtcttgatgtgttgctgtgttgcccaggctggtctcaaactcctgcccctaagtgatcctcccacctcagcctcccaagttgctgggattacagtcacaagcctggctacttttaaagatttcacatatgtatatagcagatatagtgtgtatatatataaaatatacacacatatattcttcaatgtagcacatatttattttatttactttttctttttttttgaagtgctgttggacttgatttatttcttttaagtgacgattatattctacgtggaaattcattaggagcattcccagttaaccctctgtctccagtgcccacaaccaactgaacagtacatgtgcattttgagagcaaggtcctaagagttaggacaggtctggagttccctttggacacagtgctctccaggagccccatggtgctacatattctggagttagttagtttatgtacttatttatgattattttgtagagatggggtcttgctatgttgcccaggctggtcttgaactcctggcctcaagtgatccttccagcagagactctcaaagtgccgggattgcaagtgtgagtcaccatgcccgacgcctgagtttacatagtagctatgaaatagtgacagtacagcgtttataaacactaagaaagtagaacttgagttacttcgattctgtcattttatgtgaccacgtggggttttttacatctaacatttaagatagcaaaacagagtatgaactgcagggtatgatattttgtttggtaagctcacattttagtttggtaaatttttcctagattcttacaattgaaattcattaataattattcattgttttaaaattgaagaccaagtcaagaaaagaaaatatgacattagtggtgtgatttagtaggtgtttatacctttgatagagcattggttttgttaaatttcacttattagttacttgccaattaatgacataaatattgtatcagtctgtaaccaaaggatcaaaattcaagttgttacatagatataaaaaccattgaataaatacttgtgctttattctcttttttttggacgataaaaatttttattattttatttactggcatgattagatgcagttttattttttttgtttttgagacggagtctcactctgttgtccaggctggagtgccatgttgtgatttcggctcactgcaacctttgcctcctgggttcaagcaattctcctgcctcagcctcccaagtaactgggtttaccggcacctgccaccatgcccagctaatttttgtatttttgtagagatggggtttcaccatgttggccaggctgttcttgaactcctgacttcaggtgatccacccacctcagcctcccagagtgctgggattacaggcatgagtcaccatgcctggcctagatgcaagtttaataaagactatttttgctgtttgtttcttttttggtcaattttatgttctttatagttatcactgaaagaaattttgccacatagagaagggggctgcttacaaaaaaaattctcttggtgtgaaacacactggggacatcaccaccctcagccatcatcacaagatgcccagccttgacccagtctggaccctcctactgtttctaacctttgagtgcagctcctcccaccccgtgtagttgtgtttctgtagatgtagcactgcgtcttataagccctcagtttcctactgtgtgaagggaagggctttaatgagagttttcaacgtttccctcaattctgaaatcctgtggttgaatggaccctaagctgtgctctgatcgtggtggggaaagtgtttccattacctgttggcttgttattacagtgaccgcagcccctgctgtttggagtgtctgaggcaggtggggcccagtttcctttggcaaaagaagaaactggcaagacatggaggtggtccaaggatgtggggtccgttccctgttgctttagtgcctgcacgaggagcgagggacttattccaggtttccctttgtgcttggaaggaagatgtattctccataggctccaaaattcatttgtttagacattttaattacattttttgaatctgtatttttagcctgtccaattagtcagtttgataatagcatcaatctcctgttacagctttcttggtccatttgcttgtgaattttgttttacatgttttcatgtaaaacataatttacattttgagtaaaatttaattttatgtaaaataaagtgtaccacactggtggtaatgtggctgtaatttttactctggccttatgctcattaattatttctgtcttaaacttggtggtgatgttactattttagcctttcctttctttttgctcatgtttgtgttatatgactactcataactttgtttttaattttttgaagttacataagaaaatccccacagagatcctttttcatttgatgggggcgcttaaaccatttgttggtgtaactttttggtagggcattttttgttttatgctttttatttttgcttccttggtgttttctcaactctttggcttagttgagaaagctcactgtgggattactaaacatatgcgggaaccggaagtgaagacatcagttgtcatcacgttgatcttgcagagtctgtggacattcaggtaggtgtatccagagaagttaaatatgctggtctagacagagcttgtggtagacatccaagctgggggtgaatttgataaccatttgatgagtacactggtgctaatttcagccatacatggaaaagatggttcagtgcattgaataaagaccaaaggcagaaaacctcagggatgatctctgtttcagggtcaggaaaaggagtgtggaggggaggtggcacaggagccctgggaggtgtaggggctaaccaggaaaggagggctgccagtaggtgagctcaggtgcaatgtttattgatttgggcaagaagaagagagacttctttatcaatagggtggaaagagctttgggagtcggtttgtgtgtgtgggtgtcaaggtgaatcacgtccactctaaagcttcagtttactccatgaaatggggaggaggcagagtgctcaaagtgaaggggctggggtagggcggagagtttgaggagagagaacggttggaacagccagggtggtgcatggggcagggagctgtccaaggtctgtggcaccaagaacctaggtgacatcagaaaacacatgtgggtcaatgtctgttaagggacccacttagaattgctgtgttgaataatgtacttccgtttcttaatcctttggtgattaaaaaaattacaaggaaaagatcagtctgggtctgctgcatttaattgtgtgtatagtagatgtaatctccaaggtgggcggtgggggtagttggagggatcgctttgacctttctgccactgcagagactcctgctgccaatattgaaacaatcataaatatcttattaggtttcctgggaacaaagccatgctgcaaagggtatgaaagcctgtttggcagggatgaaggtaggaaggattatatgaaaagagaggagactgtggggacacagcccgcttttctgtttgtttgcctgcttgtttgtttttatgaggggcaggctctgtggtatctgcatctatattttagaagcgcgttgctgttgttctgatattcacagggccttcatctgtgtttaaaaaactgaaaacataaggataaaaactgatttgaagcttctgacatttttataattgttttcaaacacagttaacagcatcttcccttttactgttttggacaccttctgtccgaatccttctagctgtgagcgaattcgactttgtaatgatttcttttttcacagtgatgtcagcaaaatcacacagacctaggggtccagcccgggagctttgcaatgtccttctagttccctagaggccctctgctggctagcagcccttgggtgacagcttgcttttcttttcacatctcttgcctctcaaatctgtttaagattctgcttcttaaactgtctgaattaggtgtctccgcagatttccctgtggccagctacctccccaaaccaaaacacctaatgtaagcccaccttggttgttgttcctgagcacgttgaggacatttgggcaaacacaacaagaacaggaagtcgacaacgttccagttataacctcctgctgctgcccttccagggtggggctgggcttcttccaacccactttaccacctgtctttgttcaggaaaggccagagtgtgccattgccttggaaatggcctgtgtaagaggctgagaaggggtttgaatgagtccaagaagcagcaggattggatctggaagggttgatgaggactgggtgaggtgttgtggggttgtgagtcttgtgtgggcgagagctggaaagcacagatggaggtggaaggacccttccttaccttttctctgctctctcttcctacctatttggttttttggttgtatttttgctttttaagagacagagtcttgctctgttacccaggctggagtgcagtggcatgatcgtagctcattgcaggctccaactcctggcttcaagccctcctcctgcttcagcctcccaagaagctgggaccacaggcatgcaccatgcatgccttgcttttttttttttttttttttttaagagatggggtctcactatgttgctcagtctggtctcgaactcctgacttcaggagatcctcttgccttggcctctgaaagtgctgggattacagacatgagccactgctctagacccctgtctgtttttatagcttaaagtcacttttatacttcccatggctgtgttctgacagtttcatactgtgtataccttgatctgagctgtacacctcaagctgcttggttcgaatatatttcatctttctggattaaaaccctttgaacaaagagaacaggattcttgctcatctttatacaggcagcactaactgagcagtttatccaccagaactctcatcaccagggctcatgcacattcaggctgtatgctccaacactagatgttccccgtgaaacacccgagggtaacctggctgtattgtctgacttctttgaaaggtgctgtcctgtggaaggagtgagggtgtgggctttctttgcttgactgttttaccaagtttaattgtaggaagccattcctacaattgatgactttatgtaattatgtaattaaaatgaatcattgttgaagaggagactgagtgggagaaaaaggattgggagcatcttggcacatggaagcagctctggggaaactgagagtctcacacccctggctcatgtgccacctccagcttggatgttagaccacctgatcattttcctattgcgtctggcttattttgaacccctgcatgaaatctacattgaagaggagagaatactttttttcttttcacattatagttaattgctgaaagaaacagtttaggaaatctgaaaaaaataaatagtgacttaatctaaatggacctcaatttcctcactggcaaaaaggagtggatatttgaaggctaaataaatgatgcaaaaaaacaaaatacatgtgaacaaacacatgatgagcatagtgcccagaacacttcgggttttcaggaaatgttgttttccttatcatcagtaaattggaaggtaacagagcttgatgattatcaggtgctctgatctctaatagcccaggattttaaaaaaagtcctatttacttagaggaacaatttgttctcttagagaggcacaggtggagttgacctttgtatgcaggtcacattttggattaatgcattgctgtgcttttgtactagagtatttaatattcttattaaaatatcaggaggaaatgggaaatctcaatattataatctgcttgtgtgggttgatgtgttaattcagccctttggatgtaaagctgctctgggcacggcttatgtttggctggcacagtgctgaagtgttgagaccatcgtgctaatgagaccaaggtgcagggtctgactccctcggcaggctgcggggccctcagaggaccagtcacctcctgcaggtgtgtgttcttcatgtgagcaggtggtggggtgtccacaatatgtgaagtatcatgatcaacacaggttaatcacctgatttgagaaattctttgaagtttgaggtgggccattagtagtatcaaaaacagaaggaatattatgtgtgattaaagtcgtgaaaggagctattatttctgtgaaatttgtaggcttcatattttactctaacacattttagactgagttaaacacagagtagtttttaggtttaatttaaccattcaaaagaatggttagttttaggactgattgcctattaaattactgacgattaagggaaatcaaaagtttaatagctgaatgaaaattgagtttgcactatctaatttggtttagataatactttttcagatttcaggggaaaataaaggctgttttaatgtatgaatgcacatgaatgtttatttgattctgcagtgttagtttatttttccattaatgggagaatttgaaggtgtgttaagccaacctaagcaaatatctatcatttagaccactgctttttcctagtctatctcccctcttgaaaataactatttaaaaataggattttcagccgggcacggtggctcatgcctgtaatcccagccagcactttgggaggccgaggcaggcggatcatgaggtcaggagatggagaccatctggctaatacggtgaaaccctgtctctactaaaaataaaaaataaaaaaaattagctgggtgtgggggcaggcacctgtagtcccagctactcggggggctgaggcaggagaatggcatgaacctgggaggcagaggttgcagtgagccgagatcgcgccactgcactccagcctgggcaaccgagagagattccgtctcaaataataataataataataataaaagcaagattttcattgtctagtacttgttcattataattgttgcctgtttcacctgatccatatgctgtatacccatacatgtggacacacgtgctccggatatgagttgaaaattttgggcacccaatacggggcaggtgtcatgctcattgttaggatttaatggtcaatagggtgagacttgcagtgctggagagataaacaggtgctcatactatgaatggtgcatatttgtgaggaaaacatcagtatcaaggcagcaaatacagcagcaatatttgtgtgcctgcttggattttcagatagtggattctcactaatagaatttgatatttcacctttaaaatttctcatcatagaaataaatcagtaagctctgccttataaagggactcgagtccttccatgatcacccattctacagaatgcttgtttacatatgcacatctatttctggttatcattaattctccaatgatgctgcagattcagtctctcagacatggagtctacctttgtcttgttactgatgatgtgcttaacaggtaagctgatctttttggtcatagaattggccaatgtggataatcctgttaataccctacctcggccaagctcagaggatgatattagatagcatgaatctagtctgaaaagtttttctaacaccctgcagatgtgttcaagtcaaaattgaaggtaggggtttaaataatattaggaagagctaacatttgttgagaacatactatgtccccgatgccgttataaacattttatttctgttaactcaatgtttgacttccattttgcagatgatgaaagtgaggcatggactgattaaataacaagcctggggctcatggcagacccaggagtgcagtggcagagctcatgcttttagccactgtgcttcatcttcggtggcaggatactgagtcctgtacccagagactgtttatatacagagtagtgctaacgtgttgttctaatcagtacataggaggaaatggacacttcggttaaggaaagtaaaactgagattccttatatttgacaataaaatagaatctccatgtggcaggggataactgcccccaagatccattctctatcctgcgccaattgttgccctatattctggcctaattacctgttagtactccctcaggccaactatgggcccagaccctagtgtatagtaaccctcactaaattgagtgcagcatttaaggaagacttggcaaaggtgaatgtgttactcacagaaacaaacctagagggagatgagtcttgagtgtgacttgcaggtagagctatatataagaccctacttcacaaataatgcctagttctgaatctgtatccggtggaatgtttcagaacatgagatttggagccagacgcacttggccctgataacacagacaccttggtgaaccacgtgttgtcatgtttggggggttgaatcttggtttagctattgcctagctatgtgagcctgggccagtcaacaccttcttcgagagcgtttccacctctgtaagttggtgctcatctagcagatttgtttaaaggtcaattgcctgacatatattaattaccaggttggatgccaataatttcttgttggggacatcatattctattcattcaggaatggtgtggctattatctcaaactctgccaaacacacgtactggttctcctctccagtgtactattttatttaatatttgtggagtacttacctgagctggttcagttaggaaaacagacagtaaacacaagaactagataacttcagattataagggctgttaaaataaacaggagacataaggaaaagttgggatagggtaggggaagaccaacgggcaactcactgtggaagtgatgattgtgttaaggtgtgagaaacgggaggtagagcagggtgggaggaagataccaggcagagaagacagcaagggcagaggacagctatgctaccctctagtcctagggtagcacagctgaaactccccaaacatgacaaccccatggttcagcaaggcgtgtgtgtcatgggggaagagtagattatttcctcataaatctttcattttatagttatcaaagtgccctccataaatgtattgcctgctcccttcttatcttgaagtatggtacagatcactaagattcctgtttccctggacttggaaggaaggcacaatagggtgagcgaggtgccacacaagttattagaaactgctggggagagagggctcttgtttgccctagagaattcaagggaactcaattatgttattgtagagcttttctgaaggtgtaattgaaatattcaggtgtaacatcataggatatgcaggtaagatttgtctcattaaaataacacctttaaacttactaaaggttttaaatgtcttagtcaattaaaacaatgcattagtgttacactgcagacagggattatctccataatattgtgtggagtgctcatacagtgttagagaaatgaactaaagtgaaatgaaattaaagcagaatataaagaccatgagagtaataacagtggtaacttgaggcccaatatataattttttttttgagacagggtctcactctgttgcccagtctggagtgcagtggtgcgatcttggcttaccgcaacctccacggctcaggtgatcctcccacctcagcctcctgagtagctgggaccacaggcatgcatcaccacactcgactaattttttttgtcctttttgtagaggtggggttttgccacattgcaccagctgttctcctggactcaagtgatccacctgccctagcctctcaaagtgctgggattacaggcgtgagccacctggcaccgatatatataattttaagttaaaacttttttgtgtatttttacatttttgaggcatgtaaatatattacctgtgcatttttttatttgtacgccttatgtattttttcacttttgaaaaactaaacttgaatgcctatcttcttcaacccatgtttgtatttctttgacatacttgactcctactcgatgatgtgatactattttagaagtatggttgggcagaaagggggaggcatgaaagagatgcagaagtcatgtgtttaaaaatgtacctgggattcgttttaatcgagtatggtaagacctgcagacacagaaaggagcatcatcaagaagtttgtactcacagttccctagaaacaggaggctggcacaccacccagggccacacatagaagctccaggtggcttaggaagcgtggacagtggccttccctctggtttccatgagaagggcaaggcgggatgagcaggtttagaattggctgatatggataatttcagtgagctctggacataagggctgctctggttgtctggcatctggctctggaatgatcagggcaggcttgatgagtgagagtttcctaagggaggcagctgggaggcacagcacagactggattgtttggtttgcatgtgaaagacatattccctggcaagttgtttgctatttctaggaattagccctagaaggggcaatcccctcccagggtcagtgaagccccaggggccagagcgttagggtacagaaaataagaaaacatagttattacactataatatgttatgggaagtcttctgttatttataatcaaatggagacaagacacacatccatggttaacttgtaatggaaggtagcataaagctcaatgctgaagggcgaggtaattttcccagacttcagggaagggagcgtttgtcctctgggactctgaggagatgtcttagtggatggtagaacagtccagattttccagaaaggagtaggactagaagaaaggagggtgagttcaggacacagaaagacatgcgtgtctgaagcagaggtttgcactggagggggagcaaccattggaaagacatgcgtggaagcaaatgttgaaccctttaattacaggctggggagctcaagaaaggcattgtgaatttattaacaatgcaagttcagatcccataccgtggcttcacttcctaactctgttagttagaaagcaaccctctgaagtaatgtcaagtgcctcaaaaataaattctcaaatgctggctatgatttggatcacggggtgtttttaaacatgctgtgtggcatgtcagacagcagtcatgtgtcattgtggatagattcaggcaattaggaggtgtgatgtggtgaggatttccaataagccatgatggcactggcaatgaaaaaggagaaataaacgggagctatttggctacatagtttaattcagataaatcctcattgagcctcattataacctcatcatcatgtcattgggaaaatgaatttactgtcaagtattgaagcttagaatgctgccagtgggcgtgtgttcgtttttctgtggagggtgtcccttattgtcatctaattcccacaggggactagaacccaatgaaagtgattcagaatctggggtagggcagacaggaatgtgaagcatgcctctgtcacttgctttttgggtgatacagggcaagttaactttttaagctgctaatagtaagctacaaatagtaactgctatgataatattcagaagaacagtggtagcgggtggatcctctacctagaacactgacgaattcactcctacttgtcctttggactcagatgtgactgtgtgtgcgtgtcgtatcacctgcttgttatggctgttgtacttggcactgcacgatgtcatggcctgtgtgccatgctctagactcacacacctggaggctggcattgtgtgggttctggtttctagtacaattgtgtgtaggtatagtgggtgtttcatggatgttgttttgctatgcattttaagaggcattgtcaaacctgagtggtggttttgtttattagcttgagaagagaccagttggggaagacttgaccaaacttttgggcattgagagctgtccagccgagagtgctgtcatggaggtgtccaagcgggggcagaatgtccaggactaggcgggtgggatcagtgtgctgcctgggtggaaacgcctctctgatattgggtctagaagagacacgagctgccacctggcttcactcctcacccctcactgtatagttcaaacagggacttacgcaaagttgtgtgatgagttggtgactgctggttgccctgtgcagcatcgagaccgagtccaaggctccttctgtggaaatgggtactggttgagaagaaatcaatgacatacgcaaacagagtagcctattagagagccgaatgaaaagggaagtaaccctactgtttgtgaggttggaaagggtggtcggcatgctgacaagtaatgacgccatgaagcagcgttcatacagaactttccagctgcaggagttgtgctgagatgggaatttgcgttctaggtgagacgcttggcactggtgctacccttgggcatttggaggatccaaatccacaagaactcagcctccatttgcacatggggccaggacaagacctcatgtgctcagtagaaagaaataactccctcttggaaggagtaagatgttggaaaaataattaaacactctgtatattttctcttgtggatctttcagagtttgattaggtgccataactctgatgctgaaaaggatagtcatacagtcaattgtgaagaaaattaaggtcctcgggttaaaaaaacaagccacaggataaagcctgaatccttaatggcaagtttggtgtggcatgtgactctgagcctgttgccggcatttggtaggtagaggcataaagatgtgtgtgcgcacacactgggtgcaagatagcagctcagagccaaacaaggtatgtagatctttaaaaaaaacttctccagtaggatttggagattgtcctttgctaatggttatccaaatgtttacaagcactgtgaagtaacattctatgtctgaactcctcgagctgcaagaggtgattctgtcatgcgcatgggtatgcaatgcactggagagcatgttggaaggaatccagtggtggattgcagtccacttccctctgcctcactccagtggaaagttgctcattggtatttttgtgctccactaccctgctacctcagtccagttttgcattgaataccgtcagtattcagtattgtctatataaatggtatgaggattagatattatattgatagaattatttgtggattggtaattggtataagattttgaagagatagaactgattggtatcctattattttaaaatcctttttcatctaacatctatttcgtatgtttttttcagaagttgtggttagaagattatttattgagaataatttttaaaaatctttcctttcctttttttttttttttttttttaaaaagtatacagtgcggccgggcgcggtggctcacgcctgtaatcccagcactttgggaggccgaggcgggtggatcatgaggtcaggagatcgagaccatcctggctaacaaggtgaaaccccgtctctactaaaaatacaaaaaattagccgggcgtggtggcgggcgcctgtagtcccagctactcgggaggctgaggcaggagaatggcgtgaacccgggaagcggagcttgcagtgagccgagattgcgccactgcagtccgcagtccggcctgggcgacagagcgagactccgtctcaaaaaaaaaaaaaaaaaaaaaaaagtatccagtgctcagacagagtcactttatagtgtgatgggaaaggtcacatgtaataatctatggtcctcttgctagtaagtgcatgcccctaaaccaggctattgttctcattacttctaaatctttgcttgggtcagtgggcttgaggccatcggacgctattaacttcggtttgtattctcagaattgtatttttttagtgagaatttacagttattgtttagttgttggggaaattactgctcttacccatcttcctctttcttatgtgagatatcttgatagcaatcactttaccaaaaatagtgtatgtgttggttttagaattattggattgaatgggtctgaaattgctttgactccagtctcaagtttgctgatgataaaacttctattagatttgttaagtaggatttgttttttcggcggggcgggggggggtggtggtcacaactcattggaaatgcctgttaatcagtctctctctctctctcaagagatctattgacatatacccttcattcttccagtttcttttctcaaaaccacataaacccccttgatttatttttccttttataagaccattattttctttcttgcttttcatataaccttaatgtctgatattagttttaaagtctgattagtaaaatcattttgtgttttacaactgttatacgtgttaaagtcaccttcacacgtataatttaacctcgtagacttcttaaaacacaacctgatataagtgccttcactttttatcacatcctcagccctttatattttttgttctcagtgtatctgacctagagactctatctctctagagatattatagttccaaatctgtatccagaaagacgtacacatccctgtttcgctccgcaggtctggacattaccaggagagcctgctcacttatttccctttcaaaactgttgccaactggctagcatgttgatggctctacataacttattattattatatacaatatatgctatatcatattctatgataatatcaaatatcattaacaaggtattattaatatccgacatattcttgccttcctttatattctcctatacaggcattctttcttgctctagaattataaattaactgcaacttcacaagacccgcgatagagaaaggaaaatgatggcctccactgcagagtgtagagctagaggtgtggaaaggtcaagcagcttctccaagctgacgctgggattacaaaccagctttctgtgttcccgaccaggctttggttattctgaggaaattggatctaacaagtgtttggttacagcttcctataaaggacagttacgtttagctttgttgaaaatccaattttatatttctcctagataataccgaatgatgagagagctcttccgctctccctgctgaaagttgttgattttctaattgagcagggctcatttgaggggagctgacagatttttagctcctgattctaggtcatttctatggatgctataatgggtacatgctttttttgtcatgcctcagacacaaaccattaatatttctgctctttcctatttatgcaaggtatagaatagtcccagtttgactcccttacaaaggtggattggggccaaatgtaccatctggctggcctccaatatggaaaccaggaggccacgtcttggacatttgcgtatttcagaaaaagtcatcaaggcagatattgcccaccagttttgttccagatgtacccatttggaaacccttgaaaccagaaacattcatgagatagagttctggccaatgagacgggagctgagggcatctgaggaagccccacttcccggatcgaggtgcccagttctctgtttctcctcgtgtggaacacggctgtggatctgaagaggagcagcatctgtgacactgtgacactataatcccaaagggctgggattataggtgtgagccaccatgcctggcctgaaggttattttatacaatattttaaataattttgtacatgaaacaaagtttgtgtacattgaaccatcagaaagcagaggtgtcatgtcagtgctcaaaaaggtttggattttagagcatttcaaatttcagattttcggattagggatatttaacctgtgtgtgtatatatacagtacagtacatatatatatatatatatctccttattttacatataaaacttataaataagaaactaaatcatgtgtgtgtnnnnnnnnnnnnnnnnnnnnnnnnnnnnnnnnnnnnnnnnnnnnnnnnnnnnnnnnnnnnnnnnnnnnnnnnnnnnnnnnnnnnnnnnnnnnnnnnnnnnnnnnnnnnnnnnnnnnnnnnnnnnnnnnnnnnnnnnnnnnnnnnnnnnnnnnnnnnnnnnnnnnnnnnnnnnnnnnnnnnnnnnnnnnnnnnnnnnnnnnnnnnnnnnnnnnnnnnnnnnnnnnnnnnnnnnnnnnnnnnnnnnnnnnnnnnnnnnnnnnnnnnnnnnnnnnnnnnnnnnnnnnnnnnnnnnnnnnnnnnnnnnnnnnnnnnnnnnnnnnnnnnnnnnnnnnnnnnnnnnnnnnnnnnnnnnnnnnnnnnnnnnnnnnnnnnnnnnnnnnnnnnnnnnnnnnnnnnnnnnnnnnnnnnnnnnnnnnnnnnnnnnnnnnnnnnnnnnnnnnnnnnnnnnnnnnnnnnnnnnnnnnnnnnnnnnnnnnnnnnnnnnnnnnnnnnnnnnnnnnnnnnnnnnnnnnnnnnnnnnnnnnnnnnnnnnnnnnnnnnnnnnnnnnnnnnnnnnnnnnnnnnnnnnnnnnnnnnnnnnnnnnnnnnnnnnnnnnnnnnnnnnnnnnnnnnnnnnnnnnnnnnnnnnnnnnnnnnnnnnnnnnnnnnnnnnnnnnnnnnnnnnnnnnnnnnnnnnnnnnnnnnnnnnnnnnnnnnnnnnnnnnnnnnnnnnnnnnnnnnnnnnnnnnnnnnnnnnnnnnnnnnnnnnnnnnnnnnnnnnnnnnnnnnnnnnnnnnnnnnnnnnnnnnnnnnnnnnnnnnaaataaatggatggattacagattgtacactttgggtagacatgaatagagaaaatcttgttagagaagatgaccccttgggctattggctcagaaaaggagaaggatgtggtttgatgaaaagaagaaagaaagatgttctaggaatttggcagaggatgaaaggaagcaagagaacttaataagagcaaatacgttttagaataaagtgatttccatttaaaggggaagaactggactcttcgatttccctgtggggtgagttttagggtaaagactcctgtgctgaaagccagcctgctcatctcaaaggaatacatacaaatgttgcactctgagtgctgtactcatgtttgtttcttgttagactcttatggggcagatgacagtttccccttcttttatccatgatctaggtgtcaattgccgctggcaaaaggaagtgatagtggggagtgatatcagatatgagtagttactagctcttttgtggtggaagcagtatagaaacaaactgggtctttagtctgatttcatgttctaaaaaaaagctccttatgtatgaccagtcctaaacttagctaaaataatcagctgtcccttgacagttatatctggatactacttttttatattaaagtattattaaaacaacacatgtaggtagctaaaagttgaaagagtttagaagtgcttatcatgaaaatcaataatctcctgccctctctcccatcccagtcctgttccaccaaaggcaaccactttgaactctttgtgtttttaattctttggaggtttctaccatatttcaaaattaagtttagaaatgtggttttctctacattgtgaaatacagtttagaaatgatctctctgaactctcttatagatgcagatttcagttaattacctcaggtccaagtagtgaggcagtgtatcatgtttgcctcttttctagtataacttgcttttcctgccttgttcttctccttaaacaatttttttttgcattttaatttttatcttttccatcagatcaatacacatttatattataacctctctatatattttaaaataaatatcccagaataatctcttggttttaccccttcccctccacacctcgccatcttcttgccagataaactggctgccctgtagatgtgttgctgtaaagtggtcatcccagaactttctcactgctttcttgagttgtattccctgatatttagacactgtcagggagtggggtggggggttgctttcttgattactgttttgtattgttgaagaacatcttgcagtaagaggcttcctagcaaaagcttatgtgaaaagtagatgtgagtgtctgatagcttggctgggtatagaaatctaaagtgtcagtttagaggtctgtgttgctattaagaggctcaatttcatcttcattttttttcttcttataaataggctctttttaatatctttatggtttagaaatagcattctataatgaaaaatatttagtattctataatgaaaaattttggtatgtgtctcattgttgtgggtacttcgtgtaccctttcaatcagaaatctttgttcttagagttctagcaacttcttctgtataacttgttaatattatctttctctggtttctgtggaactcttttttttttttttattgatcattcttgggtgtttctcgcagagggggatttggcagggtcataggacaatagtggagggaaggtcagcagataaacaagtgaacaaaggtctctagttttcctaggcagaggaccctgcggccttccgcagtgtttgtgcccctgggtacttgagattagggagtggtgatgactcttaaggagcatgctgccttcaagcatctgtttaacaaagcacatcttgcaccgcccttaatccatttaaccctgagtggacacagcacatgtttcagagagcacagggttgggggtaaggtcacannnnnnnnnnnnnnnnnnnnnnnnnnnnnnnnnnnnnnnnnnnnnnnnnntttccaatgtccagtacctctttgtatgtcaaaggtgccattaaaaacttgatatacaaatgagtagtctagtaaactactaaatgtaaactacataatataaaatagtagttaacagtacaattccaagtaggctttgcaaagggacgctggaaagatcaacaaaccagtgggaaaatgggcaaagtatatgaggagatgatatggctcacaaatgtatgaaaatatatttaacttgattagcagtcaaggaaatgcaaattaatgtgacagtgatgtcttacttgacataagacagtactgtaaaaaaaaactgttaatatctgttgctggcaggaatatgcatgcaaataatacaccaacacattgctggtaggaatgtgaagtttgaaaatccttttagcatgttgtctactatatattaaaatttatgctcctctaggaacagaaacaagacattaggtaggaacttaggaaatctgaatgcagtgcggactttagtttaatttttaacaaccacatgaccctcagactcattaattccacttcaggcaatcgatctcctagaattaaactcaccagtattcatggacatatgaacatgggtctttattgtgacgtgtctcataacatacaaagcctggaaataaagtaaatgctcatcatagaagaatggctgaataaattatggaaaattatatcaccattaaaaaggatgaattagaattatacaattgacttgcaaggattttgcaatattattgagaaagaaaaaaattcagaaaatggcataatgtctcatacttgtggaactttggcaaccctctgattatgtgtgaatacgtgtgttgagacatctatgtaagattgtataaacttggagaaaagatggaaacgtatataggttgttattaaaataaccatgtgtaaatcacttacatatttgtattagatgatgcatatatccacagaagcagattttctgggagctaatggtatttacgcttcagaatgtctgccccagggccccaggggggaccttaccaatgtagacatggccaattatttttgcataatttaatagacttgagccttgcttggggtaagaacacagtgtcttttcacccaaacttcccccttctcatccttcttctgttaggagacatgttttggggacctgggtaagggaaagttgagttagaaataacatttcgttgggtttagagttgtatttacatggtgtgcagtcacttttgtgaacaggtaaatttttagctctcccagcatagaaataaggaccagaaatattcttcctggccacctctgcatctgaggttatgatatggtgtagcatttctagaagtatcaaaatatcagtgtggtatattatgcttgaagtatgtgagtcatattggagagacagtgtttgaaatgtgtggagccagaagctagattttaagtttcacttacaaaggaaatttcatggcaattcctctaaatttgacaaccatcataaaaatttacatgacatatattgataagttgtggagctgaaagaagctttaccaaaagatcaattaaaaataattgatcaattattgctagaggaaaaatgaattatctgttctttctatacaaactatttacaaaattttctaagaaactacccacacaaataaaattaaaaatatggaggggaaagtattatggactattaatattaatattatagtatttaataaaaatagtatgttttctggataacgtgatgtatttttcagccttcatgaatgtgtaatatgttgtgtttttttcattataagtaaacttcacttctgtgcccaattttgttttcgtaatactgtatttttcttaaagcaagattcccaaattgtatacatgttgtatacaaattgcatccagtctccacaaaatttaatattctccttctgtgatttctgggtaaactaatgagtaaattaaatgaaaagatgactaaacattttagaattacttaggaatgaataccagtacattgtgtttttattttaaatggatataagtgaatatgcaagaaccaaatgcaataaggctattacagttcttccttaaacatcagttctctgaggattattattagataatttatgaagaacttgaacttcatctggcgcacgccccaaatgtttactttgcagaaaacactgctatgctggctggccagtagagggcactgtgctgttggtctgagttgtacaatgagcgttcaacctgcaaggcgtggacaggtggttaagataataaatattttatgtgaccagcctagagctcacagtacaagacaagaaatttctttctctctctgactccctgcctttgtctgttcccgtctgtctgtaacacacacacacacacacacacacacacacacacacacacacacacacacagaatgttgaaataaatagatggattacagattgtacactttgggtagacatgaatagagaaaatcttgttagagaagatgaccccttgggctattggctcagaaaaggagaaggatgtggtttgatgaaaagaagaaagaaagatgttctaggaatttggcagaggatgaaaggaagcaagagaacttaataagagcaaatacgttttagaataaagtgatttccatttaaaggggaagaactggactcttcgatttccctgtggggtgagttttagggtaaagactcctgtgctgaaagccagcctgctcatctcaaaggaatacatacaaatgttgcactctgagtgctgtactcatgtttgtttcttgttagactcttatggggcagatgacagtttccccttnnnnnnnnnnnnnnnnnnnnnnnnnnnnnnnnnnnnnnnnnnnnnnnnnnnnnnnnnnnnnnnnnnnnnnnnnnnnnnnnnnnnnnnnnnnnnnnnnnnnnnnnnnnnnnnnnnnnnnnnnnnnnnnnnnnnnnnnnnnnnnnnnnnnnnnnnnnnnnnnnnnnnnnnnnnnnnnnnnnnnnnnnnnnnnnnnnnnnnnnnnnnnnnnnnnnnnnnnnnnnnnnnnnnnnnnnnnnnnnnnnnnnnnnnnnnnnnnnnnnnnnnnnnnnnnnnnnnnnnnnnnnnnnnnnnnnnnnnnnnnnnnnnnnnnnnnnnnnnnnnnnnnnnnnnnnnnnnnnnnnnnnnnnnnnnnnnnnnnnnnnnnnnnnnnnnnnnnnnnnnnnnnnnnnnnnnnnnnnnnnnnnnnnnnnnnnnnnnnnnnnnnnnnnnnnnnnnnnnnnnnnnnnnnnnnnnnnnnnnnnnnnnnnnnnnnnnnnnnnnnnnnnnnnnnnnnnnnnnnnnnnnnnnnnnnnnnnnnnnnnnnnnnnnnnnnnnnnnnnnnnnnnnnnnnnnnnnnnnnnnnnnnnnnnnnnnnnnnnnnnnnnnnnnnnnnnnnnnnnnnnnnnnnnnnnnnnnnnnnnnnnnnnnnnnnnnnnnnnnnnnnnnnnnnnnnnnnnnnnnnnnnnnnnnnnnnnnnnnnnnnnnnnnnnnnnnnnnnnnnnnnnnnnnnnnnnnnnnnnnnnnnnnnnnnnnnnnnnnnnnnnnnnnnnnnnnnnnnnnnnnnnnnnnnnnnnnnnnnnnnnnnnnnnnnnnnnnnnnnnnnnnnnnnnnnnnnnnnnnnnnnnnnnnnnnnnnnnnnnnnnnnnnnnnnnnnnnnnnnnnnnnnnnnnnnnnnnnnnnnnnnnnnnnnnnnnnnnnnnnnnnnnnnnnnnnnnnnnnnnnnnnnnnnnnnnnnnnnnnnnnnnnnnnnnnnnnnnnnnnnnnnnnnnnnnnnnnnnnnnnnnnnnnnnnnnnnnnnnnnnnnnnnnnnnnnnnnnnnnnnnnnnnnnnnnnnnnnnnnnnnnnnnnnnnnnnnnnnnnnnnnnnnnnnnnnnnnnnnnnnnnnnnnnnnnnnnnnnnnnnnnnnnnnnnnnnnnnnnnnnnnnnnnnnnnnnnnnnnnnnnnnnnnnnnnnnnnnnnnnnnnnnnnnnnnnnnnnnnnnnnnnnnnnnnnnnnnnnnnnnnnnnnnnnnnnnnnnnnnnnnnnnnnnnnnnnnnnnnnnnnnnnnnnnnnnnnnnnnnnnnnnnnnnnnnnnnnnnnnnnnnnnnnnnnnnnnnnnnnnnnnnnnnnnnnnnnnnnnnnnnnnnnnnnnnnnnnnnnnnnnnnnnnnnnnnnnnnnnnnnnnnnnnnnnnnnnnnnnnnnnnnnnnnnnnnnnnnnnnnnnnnnnnnnnnnnnnnnnnnnnnnnnnnnnnnnnnnnnnnnnnnnnnnnnnnnnnnnnnnnnnnnnnnnnnnnnnnnnnnnnnnnnnnnnnnnnnnnnnnnnnnnnnnnnnnnnnnnnnnnnnnnnnnnnnnnnnnnnnnnnnnnnnnnnnnnnnnnnnnnnnnnnnnnnnnnnnnnnnnnnnnnnnnnnnnnnnnnnnnnnnnnnnnnnnnnnnnnnnnnnnnnnnnnnnnnnnnnnnnnnnnnnnnnnnnnnnnnnnnnnnnnnnnnnnnnnnnnnnnnnnnnnnnnnnnnnnnnnnnnnnnnnnnnnnnnnnnnnnnnnnnnnnnnnnnnnnnnnnnnnnnnnnnnnnnnnnnnnnnnnnnnnnnnnnnnnnnnnnnnnnnnnnnnnnnnnnnnnnnnnnnnnnnnnnnnnnnnnnnnnnnnnnnnnnnnnnnnnnnnnnnnnnnnnnnnnnnnnnnnnnnnnnnnnnnnnnnnnnnnnnnnnnnnnnnnnnnnnnnnnnnnnnnnnnnnnnnnnnnnnnnnnnnnnnnnnnnnnnnnnnnnnnnnnnnnnnnnnnnnnnnnnnnnnnnnnnnnnnnnnnnnnnnnnnnnnnnnnnnnnnnnnnnnnnnnnnnnnnnnnnnnnnnnnnnnnnnnnnnnnnnnnnnnnnnnnnnnnnnnnnnnnnnnnnnnnnnnnnnnnnnnnnnnnnnnnnnnnnnnnnnnnnnnnnnnnnnnnnnnnnnnnnnnnnnnnnnnnnnnnnnnnnnnnnnnnnnnnnnnnnnnnnnnnnnnnnnnnnnnnnnnnnnnnnnnnnnnnnnnnnnnnnnnnnnnnnnnnnnnnnnnnnnnnnnnnnnnnnnnnnnnnnnnnnnnnnnnnnnnnnnnnnnnnnnnnnnnnnnnnnnnnnnnnnnnnnnnnnnnnnnnnnnnnnnnnnnnnnnnnnnnnnnnnnnnnnnnnnnnnnnnnnnnnnnnnnnnnnnnnnnnnnnnnnnnnnnnnnnnnnnnnnnnnnnnnnnnnnnnnnnnnnnnnnnnnnnnnnnnnnnnnnnnnnnnnnnnnnnnnnnnnnnnnnnnnnnnnnnnnnnnnnnnnnnnnnnnnnnnnnnnnnnnnnnnnnnnnnnnnnnnnnnnnnnnnnnnnnnnnnnnnnnnnnnnnnnnnnnnnnnnnnnnnnnnnnnnnnnnnnnnnnnnnnnnnnnnnnnnnnnnnnnnnnnnnnnnnnnnnnnnnnnnnnnnnnnnnnnnnnnnnnnnnnnnnnnnnnnnnnnnnnnnnnnnnnnnnnnnnnnnnnnnnnnnnnnnnnnnnnnnnnnnnnnnnnnnnnnnnnnnnnnnnnnnnnnnnnnnnnnnnnnnnnnnnnnnnnnnnnnnnnnnnnnnnnnnnnnnnnnnnnnnnnnnnnnnnnnnnnnnnnnnnnnnnnnnnnnnnnnnnnnnnnnnnnnnnnnnnnnnnnnnnnnnnnnnnnnnnnnnnnnnnnnnnnnnnnnnnnnnnnnnnnnnnnnnnnnnnnnnnnnnnnnnnnnnnnnnnnnnnnnnnnnnnnnnnnnnnnnnnnnnnnnnnnnnnnnnnnnnnnnnnnnnnnnnnnnnnnnnnnnnnnnnnnnnttttggttttactttttggaaaatttgcttagctttatttttcacttccttttttgcaatattttagttaggctagcgtacttccaattgccaatagccattttattctgtttcctttttagaaataccatcttattcttgtttcatgtgaatgtgttatcatcttatgactctgaggatattagaattagcattactccaaactctaaaatattcttttaaagtttgctgtactgtttcctcaggtctcccctttcttctgtattcatttaaaatctcttttttgtggtgcaggctttctacacatatttggtaatttttcaaagaggaagtgtagcaggatgatggggtgctctgtgagtgcaggccagatagcaagactcacttttcggtgaaggacttttagacatgagtgtatgaggtttgtgtgggtgccctgggaatactcctggctgtgggtgtagcagcctggctgtgtaagattttggtgtaaccagaagaagggggcttgtgagagaggaaccatgtttcttttatgaagtcttttgcttcgaactctttatagtttatcttgtggggttcctccagattcctagccctgatttcctgtgtgagctcctctgtgtatggacttcaaatacctccctttgctttctatgcttgccacagacccttttccatcattgatgtctcatgagtctcctgagctctgcaggctgaaactgttcccctcctgtccacaggctcccctgtctccaatgcactgggcttgtgcctgcctctgccctgcctaatatatgattgtgatagtaaagttaatgtgtcaactcgacagggctatggggtgcccaggcatccagttgaacattattctgagtgtctgcgaggggatttctggatgaggttagcatctgtatcagtagagtgaggaaagcaggtggactccctagtgtgggcggccccatcaaacagttgaagccctgaccagaacaaccctctgccaagtaagagggagctcctcctgcccgacaatcttcaaactggcacattagcttttcccgccttcagagctactgaaacaatggttattcctgagtttccaacccaccggcctttggactggaaccataccattggccctcttgcccattcccactgctggtgttggagtttgccagactccatagttgtgtgagccaattccttatcataaatctctatatgtcacctagtggctctgtttctttgacacaatgacactcttattacaactgcattattattttaaaaatggattgacatatcttctgagataccatttgtgaagctagagcccgttcttcctgcctcgcaggccagggcccttgcttaggcggcagcccctcttgtgggcttctctctccctgcagctcatactcagaaggcgtcttggaggcatgttcaacttgtctggcgaaagcagaaagaagtctattttagaaaaaagacaaccccacatcttagctaatgattccattcctagttgtgtgtgtgtgttttaaactgactgcatatttttacattcctttctagtatggtagtggtgtccctgtaggcagaagtggtaaatgtgtttccattttacaattgtcagtctgaagctaggcagcctttagatcgggtctttactgctgttagaatcctgcacataacagacctatttaactcatgtctctatgttggatttcagttagacacctgcagggatgggtccactttatgaaactgtgagctgtacactttggttttgtgcactttgctatatatgcacactttggttttgtgcactttgctatatacgcatgataaacaaagaaatgtcagttagaattaaacacttgaataaagtttgacaattatgtgagaaatccagaaagatagaataatatagcttgccccagatttttaactctacaacatgagggacggatagatatggctttctacccagacctaaattaaacatttgtgttttccatactagaaatctctgtgtaccaatcatctcagctcccgatgttctcccagcttgaccacttcggtttagctttccatccagatcttatttgatgttgtagttcctgaaccctgtctccttgggaagtgtcttttctgacaaggtatgtcctccccgagaaccagtgcacccttgactgagggcaaaagcgtttgggacctgaaaaggatgggtttaggcccttgcctttggataactcgatctcagagtggctgctgctccttacttggtttgtagcatgccaacacttaggacagccttaaatctttccttgtagtagggattatttccctctgtttggaaagaatatactgaattctgaatgaaaggccaaatgtggtatacttaaatgcaatatgttttagtgttagagtttcacacgctgacctgttgcgtttcttttggggcagtggctgcatggggcctgaattgtaatgattcctgtacttgttgaggccagatatttttataacaaataattgttgtttcttttaattgaaaattgagaagaatctcattaaaaatgatccttctcttgcagtgcaaaattaaataaatctcataactcttttttttttgtttttataccatgaagttcacattttttctttctttcttcctttctttcttactttttttttttttttgagacggagtttcactctctcacccaggctggagtgcagtggagcaatctcagctcactgcaacctccgctttctgggttcaagcgattctcctgcctcagccttccaggtagctgggattacaggtgcctgccaccaagctcggctaatttttgtatttttaatagagacagggtttcaccatgtgggtcaggctggcctcgaactcctgacctcaagctatccacccacctcgccctcccaaagtgctgggattacaggcatgagccaccgtgcctggtcacatttttttttttttttttaatataaagcacctggtcatgctcactttggcagcacatagactacaattgcaatgatacagagaaggttaggatgatccctgcgcaaggatgacacacacattcatgaagtgttctatgtttttaaagttaaaaaaaaaagaaagaataaatcacttgggtaaaacctgcttttcaataatgtcacttttaatgatattagccataaatatctgatatcttgcatttggaattggttatctaagagttgttttcactagaagatcttcctggcagcatgctcagtggtcaaaatgttatcttcttctcagctcatgtttccatgcaggtgttgagataaagtgtttcatgtccatagttatttgttgaataatgcattgagtaatagaacagatttggaaatctgataggagcaggacagtcacactatttaataggaattataggtagactctaatttatgaacttaccttcaaaggtgtattgtaaattgattggtcagcagtcgacttccatttcactccttggatgtgttttgtgacagatagtctaaaagagcactaatacctctcctggtccaattactgcattctgggaacaggctatgagataaagcagtatctgacacccctttttcctgctgtagactaagaattaggaacatgttgaaaatataaatggcagtgttttaaaatgaacttagtgaccttttatttgtaactggtgagatttcagtagtttagcattaataaaatgaagtgaaaatttcttgtaaggtgctcatatgttaccattgacaggctctatttatcagtgggaattcttggatttaagattatttccagaatacaatttgggagggatggtggcaaagcctaaggaattgatgccagatgtggaaggccatgggctttgccatccattggaatgtcctctggggtggctcccaggtatgcagtgatgtccatcaagagaagtggcagagggccactgggaagggcttttgcatttggtggtgttgctcttgttctttcccttgattggttgaatgcactgctaaggaatcattgaattaaactgcttaatgtttagtgttatcatcttgtcctcaacttccaatcatctagaactccttgctgagtgaccatttgggaggaggaaggtgaatgatatcctatcgggagcctgctaggatggaaggcttccaggacatgggcatggaatgctggccctgttcacaaagtcagcttccggtggggacgcttaaagcctcctttattctttcagtaaatattgaacgcttactgtatgttgggaagatataagaaatttgtttttccatggaatgcagtagaataaggcaattgtttttgactgtctttacaccttaacatggatttactgtttccattttggtgttgcgtgttaaggtttagcttaatttctgtgtttctggaggcttgcttgaaggggaagttacactttgagcagctactgaactttgcgtcttttaaatcggtctctggagaacagctgtcaacttcaatttttctcgtagctggaaaatcagactctggtattgtctgtgggttcttgctttctgctgcatttctggaggtcagactcctgtggtgccttgtgatttgtgaggatcaggtagacccagacccatattttgccagaccctattttctaatggattgtttctgtatgtgcctaattatgagttatggagtgaagcgtgtccaacatacatgtaacaagatccaccccatgagttgggctcctcagaggagggtttgcagatagatattattgtcaggttttgtcctctcctgggaagcctccagatcttcccatctcccaaaaggaaaaaggccagtgtgtcaacatgagtgacaaggccaatgcgttggccctttgccacgttcatttcagttctcttcatacttctccacctccgtttgcccaaattgggctctttactctccctcctacaggtggagcaacgggagctctcccaccttggcgtttctgcactcgctgtcccctccctctgcaaagctcttcccctgtgcgtccatgagacttgctcctgctccttcacctccttcagggcctagttcacaggtcaccttctcagtgaaaccttccctcgccactctgttgaaaataatcctcctcccagccccagccagtgtacccttctgtatcctccttccctgatctgttttcccctgcagtattcatcacgatctatgctgttatgtgttctattttttttttaatctcgtttctcctctagagtgcaatttccttgagggtgtgcgtttttgaccacttggttccctttagtatctccgggggctggcacactgccctagtacataattagggctcaggaaatatctattgcacatgatggatggatggatggatttttgataaatcccggtcatcttcatgtcacccagtttcaggaaacactggcctcatgtttagagggagactgagtgaatcatagagaaatattcctgtttgcgcctggtcacttatctccagcccccaagctctaaggtcttgggtttccatgcagctaaagcccctccttgctgtgactagccaggaggacagtgatgctggcacatgcatttcgtcacacgagtgggaatgtctttaggggaggggtggcttatttacttgggtgaataaactatcctgttgggaagttctgtcattcacccatttacccctggagatgtttttcccctggcagagtgaatggtaaaacatctcccatcttattacatttttaaaaagttgctacataatagttgtattaacacatattttaaaggtacatgtaataatttgatacattcatatagtgtgtaaagatcaaatcaaggtaattgggatatccaatgccttaaatctcttctagatattttgacgtgtacaacagattattgtaaactatagtcaccctgctgatctttcaaataccagctcttattttctctacctaactgtgtatttgtacccattaatcaacctctcttcatctcttcctccgtgctacccctcctagcctctggtaaccaccagtctgccctctgtcttcatgagatccacttttctggctctcacatatgagtgagaacatgtgatatttgtctttttatgcctggcttatttcacttaatataatgacctccagttcaatttatgttgctgcaaatgacaggatctcattcattttttgtggctgaataagtactccattgtgtatatatgccacattttctttatccattcattcactgatggccacttaggttgattctatattttggctactgtaaatatgctgaatagtgctgcaataaatatgacagtgcagacagatatctctttgacatattgattttctttcttttggctctatagccagaagtgaaattgctggattatatggcattcctatttttagttttttttttttttgatgattttttttgagaagnnnnnnnnnnnnnnnnnnnnnnnnnnnnnnnnnnnnnnnnnnnnnnnnnnnnnnnnnnnnnnnnnnnnnnnnnnnnnnnnnnnnnnnnnnnnnnnnnnnnnnnnnnnnnnnnnnnnnnnnnnnnnnnnnnnnnnnnnnnnnnnnnnnnnnnnnnnnnnnnnnnnnnnnnnnnnnnnnnnnnnnnnnnnnnnnnnnnnnnnnnnnnnnnnnnnnnnnnnnnnnnnnnnnnnnnnnnnnnnnnnnnnnnnnnnnnnnnnnnnnnnnnnnnnnnnnnnnnnnnnnnnnnnnnnnnnnnnnnnnnnnnnnnnnnnnnnnnnnnnnnnnnnnnnnnnnnnnnnnnnnnnnnnnnnnnnnnnnnnnnnnnnnnnnnnnnnnnnnnnnnnnntttataatagcccatttacactgccagtgagaatgatatctcattatggttttgatttgcatttttctgagaattagttatgttgagcattttcctgttggccatttgtatgtctcttctgtgaaatgtctattcagatcttttatgcatttttaaaacatattattttatctatttatttattttagctgttgagttgtttgagctccttattatattctggttatattctccttacatatcccttgtcagatggatagcttgtaagtattttctcccattctctgggttgtctctttgttgatgttttcttcattctgcaggaggtttttagcttgatgtaaccttatttgtctattcttgctttggttgcctatgcttttgaggtcttatacaagaaaatctttgtctagaccaatgtcctggagtatttccccaatgttttattttagtaattctcagtttcaggtcttagatttgagcctttaatctatttttatttgatttttgtataatgagagataggggtctagatttcttttttgatatgtaattaccagttttcccggcatcatttattgaagaaactgtcctttccccactgtatgttcttagcgcctttgttaaaatgaattgactataaatgcatggctttatatctgggttctctctatttctctttttttaagagatggggtctcacaatgttgctgatctcaaactccaggcttcaagtggtgctcccaccttggcctcccaatggcttctctattctgttccattggtctatgtgtctgtttttatgccagtaccatgctgatttggttactacagctttgtagtatgttttgaagtcaggtagtgtaatgcctccagctttgttctttttgctctggattgctttggctattcaagatttgtggttccatataaacgttagaattgtgtttttctgtttctgtgaagaatatcattggtatttttatagggattatattgaatctgtcatttgctttgggtagtgttgtcacttgaataatattaattctaatccatgagcatggaatatctttccattctttggtgtcctcttcaatttatttcatcagtgtattaatagtttttcttatatagatctttcacttctctggtgaaattgattcctaggtattttacgttctttgtagctattgtaaatgagattgttttcttgatttcttttttcagattgtttgctgttggcatatagaaatgctactgatttttgtatgttgattttgtatcctgcaacttacaatcatgtcctttgtgaacaaggctaatttgactttttcctttccagttcggatgccctttatttatttctcttgcctaatttctctgtccaggacttccaatactatgtttaataacagtggtgaaagtgggcatccttatcatgttccagatcttagaggaaaggctttcaatttttcccagttgagtatgatgttgattgtgggtttctcatgtatggccattattattttgaagtatgttccttctatatctagtttgttgaggatctttatcataaagagatactgaattttgtcaaatacttttttcagcatctactaaaatgatcacatggtttttgttcttggttctgttaatgtcatatatcacatttatagatttgtatatgttgaaccatccttacatccctgagaagaattccacttgatcatggtgaatgatgtttttaatatgttggtgaattcattttgctagtatttggttaagaatttttgcatctactggacgggcatggtggctcatgcctgtaatcccagcactttgggaggccaagttgggtgaatcacttgagatcaggagttcaagaccagcttggccaacatggtgaaaccccatctctactaaaaatacaaagagatagccaggggtagtggcacatgcctgtaatcctagttactctggaggctgaggctaccttgaacccaggaggcacaggttgtggtgagctgagatcacactactgccgtccagcctgggcaacagggctagactctgtctcaaaaaaaaaaaaaaaagaattttttcatctatgttcatcagtgatattggcctataattttcttgcctggttttattatcagggtaatgctggcctcagaatgagtttggaagtattccgtgatcttcaattttttttcaaggctttaggataacttttttttttttttttttgagtcagagtttcactctcattgcccaggctggagtgcagtgccgcaatcttggctcactgcaaccttgacttctggggcttagatcctcccacctcagcgacgtcctgagtagctaagacttcaggcacacaccaccttgcctggctaggtattagttcttctttaaatgtttcatagaaatcagcagtgaaaccatctggtcctggactcttctttaatgggaggcttcttattatggctttgatttagttacttgttattgattggttgaggttttctgtctctttatggttcagtcttggtaggttttatgtgcctgagaatttattcatttcttcttggtttctgatttgttggtgcataattgttcatagtagtctctaatgattttttttgtgtgtgtatttctgtggtctcagtttttatgttgcatttccatttctggttttatttgagtcttcccttttcttcctagtctagctaagggtttgtcaattttgcttatcttttcaaaaattcaagtttttgtttcattgatcttttgtactttttttagtctcaattttatttctgctcttacctttattatttcttttcttctactaattttgggtttcatttgttcttgtttttctaatctcttaaggtactttattaagttgtttatttgaagtctttctccttttttgatgtaggtgtttattactgcaaacttcccctcttaccattgcttttgctgtatcccatagattttggtatgttatatttccatatccatttgtttcaagaaatttaaaattttccttcttaatttcttcattgacctatcagttgttgaggaacatgttatttaatttccatgggtttgtgtagtttccagggttcttattgttattgatttctagtttatttcattgtggtcagaaaaaaatagttgatatgatttctaactttttgaatgtgctgggacttgatttatatcctaagatatggtctattctaaagaatgttctgtataccaatgaaaagaaaatgcattctgcagcagttgggtgaaatattctgtaaatgtgagttagtcttgttttgtctagtatacaatttaactccagtgttcctttgctgattttctgtctagatgatctgtccattactgacagtgggaagctgaggtcccctactactattgtattgcagtctatctcttgctttagatatattaatgtttgctttatatttttgggtgctctggtgttgagtgcatagatatttataattgcctttatcattataaaaatgaccttctttgtctttgacttgtagtccgttttgtgtattataagaataggtaatcctactattttttggttttcacttgcatggaatatctttttccatctctttcattctgtgtgtgtctttataggtgatatcggtttcttgtaggcagcatatagctgagtcttgtttctttatccattcagctatatatatcttttaattagagaattaagttcatttacatgcagtgttatcattgataagtaaggacttactactgccatttttctgcttgttttctcattgtttgataacttccttccttccttccttccttccttccttccttccttccttccttccttctttccttccgtctttcagtccttcttttcttttttccatcttcctttgtggttaagtgattttctcaggtaataggttttaatttgttgctttttatttttggtgtatctattataggtttttgcactgtggtcatcacaaggcttgcagaaacatcttgtagatataacaagttatttttaaagagatgacaacttaacttagatcacagaaaggaatagaaacaataaactaaaaaaacctctgtgttttaactctatctcccctacatattgatttttttgttacctcaatttggatatatttatactgcctattttttagcaggtttctgtatgtgttttcgtttttgatagatttgtcttttgggcttcatactagagttatgagtggattgcacaccacaattacagtattagagtattctgggtatgtctatatgcttaattttactagtgggttttataccttcaaatgttttctatttgcatgttagtgtttgtttttctttcaaattgaagaagctcctttagtatttcttgtaagatggatctggtgatggtaaattttctcagcttttgtttttctgggaaagcctttatttctccttcatagttgagggacagctttgctggatacagtattcttggatggaaattttttttcttttagcactttgaaaattttgttccactcccttctggcctgtttggtttccattgataagtctgttgccagatgaattggaggttctttatacgttattttcttcttttctgttgctacttttaggatcctctttgtccttggtctttgagaatgtgattattacatgccttggtgaagtcttatttgggtcagatctgtttgttgttctctgacattcctgtacctggatgtttatctctttctcaagttttggaaagttttctgttatttttttgagtaagctttttactccttgctcttgtttaactccctcttgaacaccagtgattcttagactttgtcttttgaggtaatttcctttatcttgttgacaatctttgttcctttttattcttttttcttctctgtgtattttcaaattgcctgtctttgagctcatttattcttacttctgcttgattcattctcctactgacagcctctaatgagtttttcagttcctcaaatacatttctcagtttgaagatttctgtttgtttttattactatttcaatctcttcatgaaatttctctgatacatttttgagttgcttttctgtgttatcttgaaaatcactgagttcccttaaaactgctattttgaattcttcttcagagagctcacatatcaccatcttgttagggttagtcactggatccttgcttcgtttgttcagggaagtcatggttccctgtttgctgctgtcacttatgaatgtatgtgtatatgtttgcattggagaattagttagttatttcagttttctctgtctggattcttttgcttttcattggatatatttgcttaagagattcattgtaatttacctgttgaatttctttcttttcccattaggtcactgcctccttttcagcattagatggtgccttaagcccaggtttgtctccactctaataaacaattggagcactgtccatcccaaatggaaatggtgccaaaggggatagcctagcaatgtgggaaggtgaattaggggtttgtgctcaggggacctgtgggatgaacctcctacagcatggtgctgctaagcagacactgcaatttggtatctctttggccaacttatagagcaaagtttccagagttggggatagtagtcctgcctcctcactttgtctctggctgtccccagggatatttcttccttcaagcactccccatgcttcctgtgagttgaggtaggaacaggtatcctgccagggaactcaagatgatggggaagctgcccgtcaccttgattttcctttttccagtgttaaactgagagttgggggaaattttccacgtgcttggtgctggcagattggggagagggatgtcttggctgtggatgtccccttctcttaccatctacttggagcttttttacttctctgtggcactgagaactgtctcatcctcatattctagttttgggatatttgtggtgataaccttagtgctgtaaatttggtttttgttttctgtgtggggaatgaagccagcttgcttccacgccaccattttggaaccagaaacctcattgtattacaccttatagtgctctgctgaattaaattcaaataggaagtttgaacaaatttacctcctcaggaattatcctaaatccctgctactcaaagtgtggtcattgtaccagtagcattgaactcacctgggaacttgttagaaatgtggaatctcaggcccaccccagacgtactgaatcagaatctgcattttaataagctctccaggagactggtgtgttcgagaagtaccatcctgcaatattctggtagactcattttgataggtgctgcctttagctgtttgtagtgttatatctttaattctgtaacatgacagctaatggctatatattttggcaattattttaatgccacacaataaccttttcctggatgaatgttaatttctctgaattattgatcatgcttactctatctcaggatgcaagcatttgggctcgtttttctagttctagtagagtaaaagttagtatgcatttccctctccacttctaccctcttatatttcattttttgccacaagcaagattcctttcctcctcaactctccatcttcatggttctcagggatatgtaggtccttaagcacagtcagcattttgctcaagtggaaaatgttcatatatagctggggtaatgtgccaactgtgtgcatgtgtatctggtttatacagatggaatctcaggttcaaatgttataatcaagctatcttgcaagatagtttctacactcttattttacagtatgtgaactttctttttgttttttgctgacaaatgttgattgctttatttcagtggtcaggattgctgtagaggtatgcatgatatgccatttgattttgtcctctaagccatagttaagaagactttgtattgtgagctatcacatacatgagttttgtgtattttccctactttttaatgaacttaatgtcagctgttgattctggccagatttcacagtgacatcctgttatgccacagggccacttaaacaaggaggagatccatgtcagcaaatttctagctaattcagggatagtctttcaagttacatattgtttaagttttaactctttaaaaagtggtcttcatataacatcacatacatttttagcaccttaggtagaagttgctaaaaatgattttgtctttaaggataactctgatcactgtattgtgaaatgcgaggccattgtaccatggggcatgattttctctgaggcagtggcagatgggactattggcagtgggactatttcttgttccatcaaatgacctctggctgctatatttttgagtagtccactttggttttactctgttgttccaggcttggttgctgtccagtctcacagtagtgtactttgcttctggtgtattctgtctcctgagcccttcgcccttctattggggtgcttctaatttgttgtaaattaaaaacctgctagataatcttttttttatttattatactttaagttctagggtacatgtgcacaacgtgcaggtttgttacatatgcatacatatgcaacttgtgtatgcatacatatgcaacatgtgtatgcatacatatgcaacatgtgtatgcatacatatgcatacacatgttggtgtgctgcacccattaactcatcatttatattaggtgtatctcctaatgctatccctccccacttcccccaccccacaataggccccagtgtgtgatgttcctcttcctgtgtccatgtgttctcattgttcaattccctcccatgagtgagaacatgtggtgtttggttttctgtccttgtgatagtttgctcagaatgatgaaaacctgctggataatcttgctagaatatattataattaagaataggctcagagtgatgtcttcagagggtgagctaggaatcatataggtacttttatggtgcaaacttgaataaaatgtgtgagcagccacagctggtttggttaattttgcctttgggttatttcactgttcactcactatctgctatgtgctaggaacatatggaattgaagtaaacattcttgtcgttcccataatctgttctggggatagataaaatactaagcaaagcattatgcctatatgatataggtgtaaacactgtactgtaggcttgcatgaggagtgtcgttataaatttgaccagacttactgaaagatgtaagattgggtggaaggaaggatactttggtcatggagagacaggtagggtgtaagggagaggatgtcctaggtggaagcaaaagtgtgagcaaacatgatcaaataaagggtgtgtggaaggaatggaatttatttgggtgtggttgaagcatgaaacatctgtggtggttacccagaggggaacatcgaattgttattcacacgcctgctgttcatagtatatagctcctagaaggtgggtagatgtctctgcttatgttgtgtgaaaattaaagaagcacatgtatatcttccaatgtagaaaacaaacaccacattggaagattttctcatcaggggcgccattttacaaactaaagctctttaggagaagatacacagcaatttccttgtcttgagttttgaaacatttttttttaaaccatttgtaaaactttctaaacttcttgtcctgttcttgtgttttagagtttacatctataactgatagtattatttttctttgcacttacagtacggccaagtacagcgtgttgacatttctacctcgattcttgtatgagcagattagaagagctgctaatgccttctttctcttcattgccttattacaggtaatggttttttaacagtttccttggaattcacttaattacatgtaaaatgagattttgctaaaggttccttaactgctaaagtgttataatcttggaatatagtttgtttccctcctctagtcattgtttgatagagtgaacaagcctgactttgtatacagggagatttcttttggtatggccttgaggatgattgcagtgactgaaagaggcattgaaaagtggccttaggggccatacttttaagcctttttctgttccaaacacataaccatgttggataaaatttttaaaaatatgtaaaatacatagctagtttttaaagtaaggtaattatttttgagtaacagaaatggaacagaactgcaaaagtgtgaaacgtacgtgactgccgtaattttctgttcatggagaggatttttaatgtgccaacttcctacttgtggtctcttatcttccagcaaattccagatgtatctccaacaggaagatataccaccctggtgccattgatcattattttaacaattgcaggcatcaaagagattgtagaagattttgtaagtttttgcttttggataataaaatcattgtatgcagtagataataacttatgtgttgcctcgggtgatatatttaaggcaggaaattgggctatagcttaaccagcctctttagacacctgatggtatttttagggggaggtaatgtatactcagagtgtcctaaatacctgtacagtgacactaaacagttcaaactttgttttcaaatattaggtctctggagccccattgatttttatcactgatgttccttatagcctgctttagagcttgctaatttgggcagcaaatgaaagattgctgtgttgtctaggatggcagcattgtctcgctctgcctgaggcaattttacaagaatcttctcccctcacaatcatcctagtgtacctccaagttcattggctacagcaactatattccttttccctgtctttcttgctctgtctccccctatatatttgtgtgtgtgtgtatatatatgttatatatatgttatatatatgatatatatgttatatgatatatatatgttatatatgttatatatgatatatgttatatatgatatatgttatatatgatatatatgttatatatgatatatatgatatatatgatatatatgatatatatgttatatatgatatatatatgttatatatgatatatatgttatatatgatatatatatgttatatatatgatatatatatatgattatatatgattatatatatgattatatatatatgttatatatatatgtttgcatgtgctgtctctctgtctctggatcttcctctcctcccttacatacacacacaccttgctttcacaaacatatatgcatctttctgggaataggtatgtaaataaatataatacaggttaagcatccctaaatccaaaaaccccaaatctgaaatgcttcaaaatccaaaacttttgcatgccgacatgatgccacaagtggaaaactccacacctgacctcgtgtgatggctgcacaaaattattataaacactgtatgaagttaccttcaggttatgtgcataaagtgaatatgaagcataaataaatttcatgtttagacttgggtcccatcccagagacacctcattgggtatatgcaaatactccaggatctgaaacaatctgaaatatgaaacacttctagtcccgagcatgtcagataagggatcttcaacctgtacacatcgaagcaaagttactttatcaataaaatgaagttggctgtttgttgctgggtttatcacactgaataatcatttcagtctgatctaaagcaaggagtgaaaagttttgtacttccaagtgctagaaccaaaataaaataattgaaactagaggagaccacttctaaacttagggagtgctgatagatcacaaaattgtctaactgaattttacagcatgagcattattggcatttagtttccttgtcccctgtaatttcctgattgttttgtttgctatttcaattattcatgtggaacttttgaatgttaaactattttttttctttctgtaacagaagcgacacaaggcagacaatgcagttaacaaaaagaaaacaataggtaagatcccaggctgaaggactttttccactggaaaacttaagaataaggcctgcatttaaggaattttaaataagtagtgaatggtattgagataaattgggaagatgatctataaaataaagaaatagtaaaataacaaacaaactgaacataattttagtcctgataattaagtttgaacagcatttgtgtattttagaatgttagaaaaggttgtaattttcaggaactagacagtttttatgtccataaaaagtctaagcattcatgtccttcatttataatctctccttacttccctcttctactttttattgttttatttctacaacatcaattttttgtttgtttgtttcattttttgagacagggtctcactcctgttgcccaggctggactacagtggcatgatcatggctcactgtagctttgacctcccaggctcaggtgatcctcccacctcagcctcttgagtagctgggactacaggcaagcaccaccacccccgactaatttttgtatttttggtagagatgggtttcaccgtgttgcccaggctagcctcaaacttctgggctcaagcagtctgcctgccttggcttcccaaagtgttaggattacaggtatgagccactgcgcccagctgttcagttttttttaaattgtggaacagcaggctttttttttcttctgggctgaaaataagtagatttaacttacatacatacataaacatttatgtgtatgcatgaatgtatatatgttacagaggtacataccatacgttggtgttccattttgagggtgggggtgctgatgttatgccatcatggctaaagatagggtatgttagaattaataaatggaattctaaaagaaagcttttggattttaggaagctgattcaatttaacaccagtattaaccaatattttatttttctctttttcagtgttaagaaatggtatgtggcataccattatgtggaaagaggtaaaaactaattttaaagatgtaccagtactattggtttgaagacgcgtaatgaattgctggtcttgattgcagtataaagtttctgttagacacagtagagttttccatgaggtctgctgagacctgatgcgtgtttactctgtcccttgcatcttctagtaagggcccaatgtgtcacttcaagctatgaacttcatcgctcctgagtgacgtttctgaaatctcaaagtattttctagtttctaaatccaatttgagaaatattttccctggtcctctgttgtcttaacctaagttaaagtttatttttgtttttagcatttgtgattctcactttaaacatttttgggtggaaaggtcattaactacagagtggtggaaagggggcaagaaaccaccccatttccgttctagcacagcagttagctgctcttaataatagcaaggaaagctttgcttccacgtccctggaagtatgaggtttagagggttgaagaatggtgtggttttttggttgtttatggtgatgagtagaaaatttagaagaaatctgccataccatctaggtattttatatctcataaaattagctttttaaatgagtgttttagctggaccttcttaatggacacaagatgtgttgggggatgactctcattagtccagcattcaaagccgattaacatgatttcaaaagaaaacagctttttagaagggtaacttgaagtggttcttcttgctaaataaacatttaataaacaatgtttttaaatgcctcttacagtcttttatatctgaaaaatgcccgtgatatggtaactgcagcatttgctttagttttcgttttactttactttgttttaggagaattcgccaccctttaaagaaatttctcctttatagtgttttacagtaacaccttaacctttgctgcaatcttgaagttgtatgctgcaaacattcatcaacctcacgtttggaaaggtcatggttcttggtcaggaggttgggaattcttgactcaaagtgggagagatgctcccaatgctgaaggaattcaagggttctcccagcactgggaaattgcccctctatttctctaaggttcttcttgttactccctccccagaaaggtatcagtatcagctagagtgaagaatgatttggattcagagggcctgacattacttgaaacagcagaaaatggagtgatggtctctaattgatggtcttctgtggtccaggagctgacagctttgcagactcctaaaactcatgactgtttccatcgttcatttgggagaaaaacaacaataacaaagaaacaccagttatgtactgtaccgcatgcagttttatttccatttaaaatgtatttacttggtttatttcagtggagctcctggcatgtgccagagattgtactaggcatgggaagaatgaagctcagcgcttcccttaaggagtttcaaacttcagtgggcatcccagtcaccgtccacagagctgctggaacccagatggctgggcccactcccaggctatctgattcactgggtctcaggtggggccctagaatttgcacatttaaacaaattactagttgaggctgatgccgatggtgtagggagcacactcaagaaccaccggtgtcctgggagagagaggcaactaacctaacgcagtgcagttgctgagctctgtgtaggagaaagcttccactttgggaagagctgggaggggccacctacctagacccagtggttcagatcaggaaagtctgccctccagagatgctctagtgcgctcttgaagggtgaatcaggggtaactagctgcggaactgtgagtagttcaatgtgaggatgagaatacaggagagggcagaggtgtcaggcaaggggaagctggctgtccttaaggtccccaaaatgataataatctaatctgaagtgctgaagctcagatctgctgtcccctgggctgtagctgagtcacgggtgagcgccaagaggcagctctcaggtggatctcagtggctttgattgacttcgagaggatctttcagctacttcctcaaaattaagagacttgaggaactctctgaggctagagtggattcagggatctggaaggtttctgttcccagtgtactaattctttgagggagtattgcacacacaaggaacaatcatgtaagaacattaaaaccatttccaggccgggcatgctcacacctgcaatcccagcactttgggaggctgaggcagctggatcactttagctcaggagctcaagatcagcctgggcaacatggtcaaaccccatctctacaaaaaaatacagaaatcagctgggcgtggtggtgcgtgtctgtaatcccagctactcaggaggatgaggtgggaggatcacttgagcatgggaggtggaggttgcagtgagccttgatcgcaccactgcactctagcctgggtgacagagcgagaccctgtctcaaaaacagaaaacaaacaaccaaaaaaaaattttttttcaagcaaaatccaagtaagtcatttcttatgtacacaaaacttcttagtacttggttactggaatatgaatgtttatttagagagtaaagatgagagaaagccataatttctcttatcctcccactttgaatttaaaaaaatccactgccttttttcatttgaaaacatgacaaattttcttgtctagtggttttttctttactaattacttcttctgatttttatatgtaattaaactattcatatgaaatcgttttaattttattttattctttttagacggagtctcgctctgttgctcaggctggagtgcagtggtgccgtcttggctcactgcaacctctgcctcctgggttcaagcgattctcctgcctcagcctcccaagtagctgggactacaggtgcccaccaccatgcccggttaattttttttttttttttagtgagatgggggtttcaccatgttagccaggctggtcttaaactcctgacctcaagtgatctgcctgcttcggcctcccaaagtgttgggattataggcgtgagccactgtgcctggccaaaatattttttacttttaaaaaacactttcaattgacataacatccattgcttttgtactggtggttgttaaaacagctttgtggcattttccccagacactttaataaacaacttaaagcaccaataggatacctttcagtaaatttgcctttttcccaacagaaaattaaacatgggcacctgctagcttgtaagatctggcagtttttcacaagtatcgtatcacttgaaattcctggtttctaagagaatagtaacatggctagaataggaaatagaaagcataaatgcccactttgagctttgcaactattactgtactagtaatggtcttctggtatcgtcagagaattctaatgtccttgaccttcacactcatgatgtcctttcagttatgctcccactgatggagactgacatttatatggacctgttttatgccaggtgccgtgtatacttccttagtcactgcattcaccttacaaggccggtggcactgttttcctgtttcagacatgacacgctggggcgctgggaggtgaagcagcttgcggagatcacaaagctagcacacggctataaagctaggattggagttaggcttgcctgatttgaaagcccctgttctctctaccctagtgctttctgcgatgttactgaaaggattggtagacacttcgccatggtaccattttggagactacagcccttttccttggcttgagatcttctgtctagtggagtctgttccccaaggtggtctctgactttggccgtgatcctttttctgggaatttcttgaggctgtacaaatcttctccattttatgtggtatatttccagggggactttcaggtgcacttttcatgggtgaatttactgttgccttttaatcagagcattggccttccgtgcagcttgcccagttttgaatcctggttctaacactcagtggctgtattactgtgatcaagttactttgttttctgcacctcaatttgtaaaacagagaaaaatttataaaacagagaaaaatttatgtgtgttaacttagttgatccttgtagtcactctatgaaatatgtgcctttatcctcattatatagatgaggaaactgaggcacacagagtttatataacttgttcatcattacacagctcatcaggggtgcagtggggattgagcccaggctttaggctggctctggtggtgtgtgcgtgaccgttctaccctactgtatacagctatggaaatgctgaagtatttgtaaatggatgcataattgtaagaaaacgagatctttatagctgttctgacttagcccttttctccctttccctttccttttttattaaacatcattgcaaaaaaaggcaacattaccagtgtctgcatggaagcactttccttttgttcttgtcaaggaaaataatttgggcttctctatcttaaacttcatggcttagttatataataattttttcttcaaatatttaagcacctttttcaccatgtgtgttttgtttcttttctttcgtgcccctctgtcctcatccctgtctctctaggtggcagtgggagacattgtgaaggtcgtcaatgggcagtatcttccagcagatgtggtcctgctgtcatccaggttagctgtgctagtaggcaccttttttgcaataaatgttaagaacaataaaatattaagcagcacctggggcagtcttgagcagcctgttcccttctaccatcctctctctgtcccattcttccatttcttgtcatttcccttctcctgccatgacccttggtttctttctcacattcattcctttgtgctttttctgaactcttttatgtgtgttgactccacttagtctcctggctatttggggtttttttcttatttataggggcactgagtcaagagcagtggagtggtccattcattaatgtcaggttgcagcatatctgagatttcagaatctgtttcctgatgggccctgccagcagtctgtcctgcagaacccagtgctgcacattgatagctgttcaagaaccatgggtgttttctcagcgtaatcgtgaccagcagatggtgtttgctcttcatccatccatgttttgccccttttctgtccaagtatcattttcatattctctaggtagttttattctaggaaggaatcatcactcagtgcagttcttgacttttttggggcttggtgcatgaaagtacatagctaggaaagaaagccaaaattaggtcaagaattgacatctattcttgaattcaagattaaattgtgtgacgttaggactataacttcctatatttatacactgttgggaatcatagatcggcatgctgtttgcattttctttgattgcagacagcgtttcttgtattgaagttaatcactcattggattttaagcctaagcattaattttctgcttgagataatagatttaaaaataggactccaggcctgtggagggggaaaaagaaccaataacacagggcaggatttatgtttgtccatattgattgacaacaaagaaacccttagaaatattaaaatattgatcacttgatagttcgggctttaagtctttaagtcttggctgtgaccttagaaaatttagtgtgtgtgtgtgtgtgtgtgtgtgtgtgtgtgtgtgttcttgttttgttttggagacaaggttcttactctgtcacccaggctggagtgcagtggctcaatcatagctcactgtaagttcaaactcctgggctcaagtgatcctcccatctcagcctcctgagtagctgggaccacaggtgcatgccaccatgcctggctaatttttaaaaatttttttgtagaggctcatttttaaaaattttttgtagatgttgcccaagcttgttctggaactcctggcctcaagcaatcctcccgccttggcatctcaaagtgctggggttaccaagcgtgagccacagtgcccagccagttttttttttttaacttggtcttaataccagattgctttagctgacatcatgtttccagcatgctcattattagtgtctgagtgtgtgctgtgtgctgaacaacctgttgaggaggttgtcccacttaatcttcccaataaccctggatagccttcttttgtacatgacaagattgagatacggagagactaaacaatttgccaaggccatatagcccataaaggtagtgctaggggatttttaccttaactagtggttttttagttggaagagtcaaggggtggttaatcactaactgtgtgaacctagctaaactcaaagattagaaataggattataatatctgttatgcttatttttatttttcgagttttctatctttaatgctaggtgttttgattaaaaagttggactcgagatgtaaaaatggcagagaattaaagccttgccaagcctgtgcctcgatccttcaactcctctggctgttgttttcttcaaaaaatgtgtgtttctactggccatgccttgggcagcctttttggtcaggcccagccccagacttgaaggattgcctgaacccagtggttgggtctgactggggacatcacatgtttccctttctctttcatcttcagttcattcctgtcttcttgaggctcagcagtcattatgtggggcttacaaaggcagatcatctgggcaaatgactctctactggtactgagtcccaaagatgagtgtgtgtttcctttttcatccattactcctactatcgtggttatttataacaatttattttgaagggccaatcagcagacacagattccataatagagattttctaaactgtgaatttgtggaaaggaccttatgaaacttggctctttttttctctctccttagtgaacctcaggcaatgtgttatgttgaaacagctaatctggatggggagacgaaccttaaaatacgtcaggtaaagtcacctctgatgacttgtgttgttatggtagacacaactgcaaatgtggtccccacatatctttttctagagaaataaaatattcagccacaaagggttatgccttagccctaatggaatctatgggaagaatatgccatttatgatgagagagaatgtgtctcgaaaaagtaggctgcatcaaactctaggtcatgcagggtgccaggccttcatatagcgtcttattgagttctctgcctgtgatgctggagagaggggacatctcgatgaagctgagtggctgggaaggacacagcttagtggacaaatggagcagaaaagctccaggtaccccagtttacatcattgttgtaataaagattctaatcctagagggtgatataattagataaaaaacttccatgccttaaagaaaactattcttaccatatattttaattctaggatgaagaatagtcttttttggttctttttttttttttgagatggagccttgctctgttgcccaggctggagtgcagtgatgcgacctcggcttactacaacctctgcctcccgggttcaagcgattctcccaccttagcctcccgagtagctgggactacaggtgcatgctactacacctggcttaatttttatatttttttagtagagatggggtttcaccatgttggccaggctggtctcgaacccctgaactcaagtgatctgcttgctttggcctcccaaagtgctgggattacaggcatgagatactgcacccggccaagaatgaagaatggtctttaacatataaaaattttaagcactttgaagcttaaaaaacttttgctgcttaaagttgaattcagcaattctatccatatatctttcttttctactgtagatatttgctttagactttttttttccatttaaagaacagttacagcctgggcaacatagcaagaccctatctctacaaaaaacttaaaaaatagctgggcatgatggcacatacctgtagtcccagctacttaggaggctgaggtgggaggatcacttgagctcaggattttgagccttcagtgaaccatgattgcaccactgccctccagcctggaggacagagtgagaccctgtctcttaaagaaaaagtgaagagtgctagataatgtaaaatattggagggctactctattctatctttatgaccagtgttagagtacagctagtagattatgcttgctgtaaggtgctggggtatgttaattattacttatgcacggatgtttctagtacagtggtggaatcttaactttcagcttcattacattcttttgccacttttgcattagatcgttgtggcaaaagctactggaaaagtctgccttgaggggctgacagtttgacttgttagccccccaaattattgcactggagatgccttatttttccttttgattaaccatagggatgctgaatggtgtccctaagcacagaagattgtgtttgacttcctcttttggtttaatcttttagggtttgagtcacactgctgacatgcaaacacgtgaagttctgatgaagttatctggaactatagagtgtgaagggcccaaccgccacctctatgacttcactggaaacttgaacttagatgggaaaaggtattatatgccttttcttcattgtcttttaaactatgtgactaagaattactggagctttggaaaatatgtttgtttcctagttttgtaatattttaaaacagtgagatttcataccctttcaattaatttaaagccttccttagatttaagaaaaaaaccctgagcccaagggcctcagatgaggctcaaagcatgtggcatattctttctgtgcctactctctgccaggcaggagaaatggttttagctgcataaaattgtccagaaaagcagaggagagttatctgaggtgtatacaagctaatacacttgttacagaaatgtgtgtatgtgtattttttttttttttttgctaaccaccttctaaggagcgttcatttgtttttagaaagttgagtgaaatgaacacttattcttcctttagaatattcagtgccctcctgtctatattctgttatctttgttcttctggcatttgttatgttgttctggagttgtcttttgttctgatgttggagagcagtttctaccttctggccatgtttgtctagagcctcttgccaatgccccctccaaccctgtaacccagcctcttgcaatgtcctttatattttgacgacccaaggcttggaaggacctgatcataggaatcaacccaaattattataaatatgacaactaagtgtgactgcttcttggtttcatttagcatacatagctatactatgggctccccattctgagtttctaaattgtcactcaggtctttatttactcattaagtcatccttaaaaaaattgatatgataggttgctgctttttaaaattttactccttcctaatagtctgtaaaatacactagatttattttacaaataataataataatacttccaataataatacttaactacaaatgagtaagctttggttgttattttagcaacttcctttctgggtattgagtttcataacaggatcatgagagatataattacctgcaacattttatagaaaaagcattttttttctgtagtgatgaatgtaaaataaagctttctgtgggtccttttggggtagattaagccaatggtaacctttgttgtctgtgtttctcagtgaagtagttcaaattggaggaaagggaacatttgatttattgtgggttcatgtttaagggaaaaactcatgcttattttccagactatcattaaatatcattgttgttttttatttttagccttgttgcccttgggcctgaccagatcttattaagaggtacacagcttagaaatactcagtgggtctttggcatagttgtttatactggacacgacaccaaactcatgcaggtaaaacatttctatgctgatttcagtcttttttttctttctgcttttattgactagaaggtggaaaatgcagatgttgcatttaggaagttcaaatttgtctatgaacctaaatttggaaagaactgcctttattttagtttcttaggtagctttttctagatttctgttctcttatctgatatttgttaccgtatgcctgaactacaaatggtctttgttttctggattaggggaacaatcaattctaacttattttatcttctggacttaagcgggaattagttctaacttttaaatttctctttctacttctcctctttatcccattaattaggattttatagcaaattgccttatttaactgaactttagagactttaaaatcagttatttttgaaccgtttagttttcatagaccgaagaaaaaaatgaagttaaaatgattttgctctttttccctgttaatgttttttaaaaaactgtttgtgaatttataggtcacattgctattatgatgtattttgccagacaccttttgaaattctacagaaatcagtgtccctgtatgtcatttcttacatttgtttggtatcacttggcatcttatttttgccaatggtggctattaatgagaattggcttttcagcttgtctgttcttttgtataacttctaaaatgcacatttggctgtatttcttgatttaaaaatatttagtgaccacgtaccaagtctagtgctagaccatatgggtgcaatagtgaaaggcccaggcttatcctcggggagccagttgggctaaggagtaatatagaatgacaaagtagagagagagatactggaatgtgtgtcattactaagtgctgtcagtgtgtataggagggtcattcaacctaggctggaagccagtggactacatgctaagaatgattcccgtggcagaagcacattttagatatcgagctagggaagggagactgttgtgttggtctcctctttgaggtcaaatgatagtcagatgaaagaggtaagtattagaggagatgaagcagtagacgttggtggccaccgcagctagtaaacacattggagacagggaggagagatgggattagaagggttgagagactccctgaagttgaagaggattgttggagttgctgagtgacaggctgatcagtgggtagaatcttgtctttgtatttctggggtagagagtttctagcatgggagacctgggagtgactcgtgtgagtaggaagacaaaggcagagctgttgaaggccattcaatgttgacaagtaaggaactgagagactaaggcatttgatgggccagtgctgtgattttgaagatgcaataatggtgaagctgggccagaaaggaatgccatgagccagttgtcaagtcttctgtgagtgacagggagcaactgagaggtgtggcctggctacgggggaggggcagaaggtagtgtagccaaatggcgtgaattttatgagtgagttttttttttttttttttttaacatggcatccaaggaataaaggtctagaagtattactaggtcttgaatatacatccagtaatgctaccttcagaggccaaaggatgcagatgtctactggcgcaccgtctgcttgggggtactcaagggaggcgtgtccttgacttgtgaggcaaggaggagagagctcttgagggagtgggagtacagagggaagttcaggagctggaagggtaggggcccaggtgcagtggcctgttgcagagcttgtgtgttgaagcaaggcgggagggctccatggcagctagaaaaatgaagagttggtgaatgctgagaggcagctcttgggtggatcaggattatttagtgtatctgaagtgtgcctgatccatcgcccctgctaggtccttatccattcacaagggctgactggaatgctttaagtttattgtttctgagcggcctgcatatgaagactttatcttgatgaatagtttagtgctgtagccatgcaagaactcaggaggctgagatgggtggctcattgggaccaggagtttgagaccagcctgggtgacatagtgagaccccatttcaaaaaaaaaaatagtttagtaccctgctacctagaaagtatcctttaactcccatagtgcagtgtcagtaacccttgctgcacgctttgggagctccactaaccacaaatcactacttctggcttttgtttgtttgtttgttttttgagacagggtctggctttgttgcccaggctggagtgtggtggcgcgatcttggctcactgcaacctcagcctcccaggctcaagccatcctcccacctcagcctactgagtagctgggactgtaggcacacaccaccatgcccggctaatttttgtattttttgtagagacgggatttcaccatgttgcccaggctggtcttgaacttctgaactcaagcgatccacccaccttggcttcccaaagtgttgggattacaggcatgagccacagttcccagcctacttctgttttttatgatgaagtggcagacagatcatgggtagctagctcacatttggtcaaggccccaaagctagttttaagattgtgcatattataaatttaagcactttccaatatttcttatacactgggtttttttttaacagattgtaatatggtttttctagagcatacattggtaatatagcttttgctctagaaaaccaatattacatgagttaattaaactatcttttaaaacgctccagtcttctcttcagtgagtaaggcatgcactgagtttgcattttgtgagtgtgagaggcacttttccttgtccctaggtgtgagaaacctctttgcaaggcttcttgcatgttgactgctcatgtatagaatgatggaaaaccccagaaacatctgtgctagacctgctgtgcctttagggctgaaacaacaggtaaaaataatgagctttcaaaaggaatataacacacatagctggaagccatcctgtttgtgaaataacattgtttgtctgtgcttgtgctacttgaccacagagaggaaactcaattgctgtcgggttcttctaccttttttttttttttttgaagtctctcacctcaatgccttttgcccttcaagtttccttcagttcatgtttagtttacttacatgtagaaatatttatgtctataatttctattagttgatttaatgggaaaaagagcgattatcacactaattacagcgaacataattacaacaaatcatgcactattttgagtgatgcacatatatcaattcatttattcctcacaatggctaggtagtatgtgctcattttacagatgaggaggcttgcagcatagagtctcctagtaacccaagcttacaaaactagtaggattcaaaacacaggcagtctggccgggggcagtggctcacgcctgcaatcccagcactttgggaggctgaggcgggtggatcacttgaggtcaggagttcgagaccagcctggccaacatggtgaaaccccatctctactaaaaatacaaaaattagctgggcatggtggtgcatgcctgtaatcccagctactcaggaggctgaggcaggagaattgcctgaacccaggaggcagaggttgcagcgagccaagattgtgctgctgccctccagcctgggtgacagagccaggctccgtctcgaaataaataaataaataaataaaaataaaaaataaacaaataaaataaacaaaacacaagcagtcaaactccagagtcagtgtaacccaggagtccccaagccccaagccacagactggtaccagtctgtggctgtgaagaaccaggccctacagcaggaggagagtggcaagcaagctagtgaagcttcatctgtatttacagcagctccccatccctcacattactgcctgagctctgcctcctgtcaatcagcggtggcattagattctcataggagcgtgaactctgttgtgaactgcgcatacaagggatctaggttgctcattccttatgagaatctaatgcccagtgatctgtcactgtctcccatcacctgcagatgggactgtctagttgcaggaagacaagctcagggctcccactgattctacattatggtgagttgtataattatttcactacacactacaatgtaagagtaatggaattaaagtacacaataaatgtaatgcacttgagtcaccccaaaaccatccccacccaagtctgtggaaaaattgtcttccacgaaaccagtacctggtgccaaaaaggttggggacagcttttctaactagaattcaatggcctgtttctcaggagggaataaaatatctaagatacaggtctgatttcagcttttcaaaatctgacattttgacctgtttctatttataagtccgttacactgaagtagctgggttcttcaagaattttatggaagaatttataatacttgtaggaatttaacattaaaagctcatcattgggccaggtgcggtggctcacacctgtaatcctagcacattgggaggcggaggtgggcagattgcctgacctcaggagttcaagaccaccctgggcaacatggtgagacccctgtctctactaaaaatacaaaaaattagctgggcgtggtggtatgcacctgtggttccagctactatggaggctgaggcagaagaatcgcttgaacctgggaggcagaggttgcagtgatccatgatcacgccactgcactccagcccaggtgacagagtaagactctgtctccaaaaaacaaacaaacaaacaaaacaaaagaaaacccatcattgatcattgcaagtaaaaatgttcagggggtgggagtcagtaggccaaggttggctttccacaaagtgcacatgttgaagcttgaagttttgggattgttcctcttctgttagatgaaagataaagttttctaatcctcctaattggccagaattcagccactgaaaaagataaaaagtcaataataaatggggtatagaaatgaggtttatgataatttttttcctgcctgtacatttagtgaatatttattaagaatgatgagatcttgcttagtttttaagagttaggatgaccagtcctggacctggcctgctggcccttacgttgaggccagacctggatgtgtcgtctcagttgaccttgatacagtatttgattgatgataagttggcctttactaatggatttccatttagactcctgaggatttttaagtccgtaaaggatgaataatttagacaaataaagtaaaagggaaaaaatagaaataaaggaaaaagctgctgtgttgtttagatatttaaaggacttagcttttcaaaatcaccagtacaatcccccaactcctctgcccccaaagaaaactgtggggagatagtatttttggtttgccaatagaattcaaataacaatttcagtgatgtggtataaatttttcttggagcttaggagtgaattgcctcatgttttcatctcagttttattttcacattgtgactttatttgtattcttatctttggagacattttcatcctagctcttttaatgatcagatcaatggagactagtgaaggagaatgctgacttaagtttggcacaaggtaccatttttatggttagtgccttacaaactctcagattatccaaacttggcaaattggtgttgtctcttaaaagtccgggcccggccgggcgcggtggctcatgcctgtaatcccaccactttgggaggccaagacgggcagatgacaaggtcaggagattgagaccatcctggctaacatggtgaaaccccatttctactaaaaatacaaaaaaattagtcgggcatggtggcgcacacttgtaatcccagctacttgggaggttgaggcaggagaatcacttgaaccggggaggcagaggttgcagtgagccgagatcgcaccactgcactccagcctgggcaacacggtgagactctgtctcaaaaaaaaaaaaaaaaagcctgggcccatgattcatggaaggagacctgcaggctgacactcctgtgtgagcctctccctgtccaattcctgacttctgatttaagtcaggaattatttcacccccaggaatggattataaataattcccctgtggctttcctctcttcagtgtctccttccccaacctgctgttattactgtactggtttcctctggctgctgtgacagatttccacagttttagtgacttaaaaaaacatgagttattgtgctgcagttctataggtgagaagtctactatgagtagtagactccctgtgctaaaacccgagatgttggctgctcttttctgcaggcttcagaggggactctctctgatcatttctctgtctccacctctccctttgagcacaattcagaaagcttctcccttttgatgacccttgtggttagattgggtccacttgggtaatccagaataatctctccctgtctcacagttgttaatttaatttaatcccatccgcaaagtcccttttgctgtataaaatagcacactcaggtcaggcatggtggctcatgcctgtaatcccagcacttggggaggccgaggagggtggatcacctgaggtcaggagttcgacaccagcctggccaatatggtgaaaccccatctctactaaaaatacaaaaaattagtcgggcgtgatggtgggcgcctgtagtcccagctacttgggaggcgaggcacaagaattgcttgaacccaggaggcggaggttgcagtgagctgaggtcacaccactggactccagcctgggtgagagagtgagactccatctcaaaaaataaaataaaataacatactcgcagtgccccacaagtaggatgtgggcattactggtggaggagggggtggtcattagtttgcccaccataagtaccttcagatattttttaataaaatgacttcaggtgcataactgtctttctcaaacagttgtgttgactttcccatggctgagaggatctagtcccaaatgttccacctgaactggagtgattcttgaatctagccttaatgaatctttctatactctcctgccaacactggcctcagctccacctgggctggtttccccccagcagtgagaaggcaggtgctaagcctgtgataaggttgccattctccttccgtttctcctttgctgtctacatcattcaggatgccactcagctttctcctgtccaggcccttcctgactcttcttggtcctgcttcttgttcccagttctccaagtgaactttttgtccatccacttattttgaaaccctctaatgttctgttttgcattattgatatgtatgtgtttgtgtatgtcttttttattcctcaaattctgagctccaggaggaaaaatatgtgctttagaaatatctctgtgtatttattgcagagctgtgctattatcgtgaaggtcttctctagatttttatggtatggaatgtctaagtttctcttgaattaccagtgttctgatttctttgaaactggactatatttagaacctgttgtgttctaagataaggaaagtgacaattatatgctaagatataatcataagaagtacagaatgaatcatgtaatgttggaatgtgttctttaaactggtagagtatgttgtctttcttcattacttaaaactagctattgattcaggagcatggtacacttttgaattgcattgattatttggcaaaaaaatagtcttttacttgttggttgttaaatatggttgttttacctcctttcccccaaccccttgccccaaatctgttctgtgacccttactgactttcaatgctgttgtgtagaattcaaccaaagcgcctctcaagagatcaaatgttgagaaggtgactaacgtgcagatcctggtgttgtttggcatcctcttggtcatggccttggtgagctcggcgggggccctgtactggaacaggtctcatggtgaaaagaactggtacatcaagaagatgggtaagtgtcggggtgggttgcttgttccagtggaagaaaaccatttttgagatgttcttgcagccatggttgaagtgtggtgtccctgccgtccttctgttccctttggttactgtacataatgccagcctttcaaggagaattgagattaggatcatgtgatgaaatgaagatgggcacatttgggacttgtcttatactcaaatggttatttttaaactctgtgttaaagtattttcttagtggttgccctaggaattacaatgtatttcccaatttatccaaatctacttttgattaatactaacaattctagtcaaacacagaaatgtcactccagcgtacctccatttcctctcctgcttggtgctgtcattgttatattccatttatctgtgttgtcaactccaaaatagtgttataataatttgtgtctcttaaagaagctaaaggaaaaaagaaaaaaagtatattgatagtgttttttgttgttgttgttttgagacggagtcttgctctgtcgcccaggctggagtgcagtggtgtgatctcggctcactgcaccctccacctcctgggttcaagcaattctcctgcctcagcctcctgagtagctgggactacaggtatgtgctaacatgcctggctaatttttgtatatttagtagagacgggatttcaccatgttggacaggctagcctcgaactcctgacctcaggcaatctacccgcctcggcctcctgaagtgctgggattacaggcgtgagtcaccacgcctggccagggttgttttatattaacatatttacttaccatttccaggtctcgctcttcatttcttcctttggatttaacagctggtgtcatttctttgcttcatgtatcttcattctctcctcactcctttgcactgtcatatatattacatctgtatataagttcaacaatgcaattttatgatgcttttagcaattgcttttttaaaattgggaatatataattatactatcttttataaatcctgtagaattatcattactagtgtcctttgtttttgtggattttaattactgtctggtatttctttcatcctggagaacttctttagtatttcttgtatttgtaattgtcaggtagatatttgtttataccttacagatatttgtaactattggaacttagagatcctatttagaaactccttaattctacaggagaacaagagagcaaagtaatatgtcaggaagaaaagcaaccagcaggaaaagtggaagggttggtagtgagtaggaagtgaagggattgtggaaaggtaaaattactggccagcatatgcctgctccccctgtaccttcccagctccttgtctttccatcacagccacgcttcaaaactctaaattggaatcagactaccaccatttgatgtaatttcctgggaaaaaacctagtaactatggtttggagccattacaaattatcagtctccctccaatcccagccttctgctatctttattctcattctagttcccttcacagctttaatatcagttaaacgctgttgcaaccttctccttaagcctcttgctaagttaagaagatctcactactttacccttcaagcagaagatcatggctgtcaaggaaagaactttccctttgataccccagaccttgtccccctctccctcccccattctctgttcctcctggagctgatgctgcctctgctgtggactccatcccctagggtcctgttccatccttagggaacttgttccgtccagatatcccttctcttatctttagctgggctcaagccttctctctctttgtctgcttctcttgttcacacttttgtccatctttccagctctttggagtatccccaatatacacgtaccttagtgagcttgtaggtgttccttacaaccatttcaaaggcctgtcttcttttctacattctttcaagtttgcttcttttctctgttcttcaaaacttgaaagcagcatttcttcttctggatggccttcagtgaccatgccttcccattagaaagccttctgtgttggttcccgctacgtcctgtgagcctctctttagcggatgcatcctgctgtgcagtcgcattgtggggcctgtgtgcctcctacagaaagcagcctttgaactcaccgttcctgacatgcaggaggtgctcaataactattttaacatgaatctctaaatgagccaatagactttagttgtgaacacctttcagatactctggtttccttccacagacaccacctcagataattttggatacaacctactgacgttcatcatcttatacaacaatcttattcccatcagtctgttggtgactcttgaggttgtgaagtatactcaagcccttttcataaactgggtgagtattaaagcagagttgaatcactattttccaatgctatttcagagcctttggcatttaattgagagctcaaaaaagaagaactatattcatttaccattaggtccaggggcttaaactggccatacaaagaactggccagggatcaccagtgagggtgtttttggggaatggaagggcagtggtacctattcaaggcgttgttgtgaggattggtcagagaatggggtggaatgctgagccagtgcctgtcatctggctgcacctgctattcacgcttttaacatctaattaaggctgaagaaaaggcctcttgggtgtgtttactatagtggtcactcgcatatcaaaattcattgtgatagtcaacttggatttgattgtaagggtggagataagatatttaaaggactgccatggctcttaagtagtggactttagcagccagtatttgtagaccaggcactttgatgtgcatttttatttgatcttcacagcaatcccgtcagcaaggtgagaatcatgagttagtctaggttgtgaaatgattattttgaaatcaaatcatatctatataaatataaatcatgtgtgtgtgtgtgtgtgtatgtgtgtgtgtgtgtgtgtgtgtgtgtgtgtatttcttttttagatgaagtcttgtgctgtcacccaggttggagtaaagtggtgtgatctcagctcactgcaacttccatctcttgggttcaagcgattctcatgcgtcagcctccctgagtagctgggattacagacatgcaccaccatgcctggctaatttttgtattttgagtaaagacagggtttcaccatgttggccaggctggtctcgaactcctgacttcaagtgatctggccacttcggcctcccaaagtggtgggattacaggcatgagccactgcgcccagccaaaatcagcatttctattaaaataaaagggttttagattacccattcttagcttcttttctgtgttaatctgaatgaagaattaatggtatatattttctgaaatcctgtctcttgttctctctctctcaggacacagatatgtattatataggaaatgacactcctgccatggccaggacatcaaaccttaatgaagagcttgggcaggtgaaaaagcctctgggaactttgggaatggtgacacgagcatgagggaaaatgagtgttagcagaagaaccatggaaagattttgcaaaaatacttctccatgaacatggctagaacatctgaagagctatataatacttttgaatgtgccagtaaatataagcgttactcagttttgtcttgctttttgagacacagctatgtcgtatcacccagaagtaaccagaaaaaaaaaagaagtaatataaaaaatacagtgcaacatcatttgggacgcttaaaaaagtgttatcagaagcaaataacggggaaaacgatggctgagatacttagatattgagtaaccctacaaaacgtgtgggggccaatttaaaggacatgcatttctcgcatgttccgaattttgtctctggaatattctagggaacagtatcttttccacctttacccctgaactcctcttgcctttactaagttgggctttgcattatgtctgtgtctgacattgacattcctgtaaggaataacctctttttaaatgtttaatttaatttaatttattttttcaatatttattttagattcagggggtaaatgtgcaggtctgttttgtgggtatattatgtggtgctgaggtttggaatatgaatgatcccatcactcatgtacctgagcatagtacccaacagtttttcaacgcttttccccaaccccatctagtagtccccagtgtctcttgttcccatatttatgtccttgagtatgcaatgtttagctcccacttaataagtgagaatatgtggtatttggctttctgttcttgcattaattctcttaagataatggcctccagctccatgcatgttgctgcaaagaacatgatttcattttttttctggctatgtattccatggtgtatatgtaccacattttctttatccaatccactgttgatgggcatctaggttgagtccatgtctttgctattgtgaatagtgctgtgataaagatgctgcatgtctttttgttagaaccatttgtgttcttttggatatatacccagtaatgggattgctaggtcaaatggtagttctgtattaagttctttgagaaatcttcatactgctttccacagtgggctgaactaaattgtatactcccccaccaatagtggataagtgttcccttttctgtgcagcattgccagcatctgttgttttttgactttttaatgataaccattctgactggtgtgagatggtatctcattgtggttttgatttgcactcctctgatgattagtgatgtggagcattgtttcatatgttttttggccacttgcatgtttctttggagaatgtctgttcatgtcttttgctcatttttttaatggggttgtttggtttttgcttgttcagttgtttaagttgcttatagattctggatattagacctttgtcggatgtataatttgcaaatattttctcccattctgtaggttgtctgtttactctgttggtagtttcttttgttgtccagaagctctttagtttaattaggtcctacttgttgatttttgaggactaacctcttttgaatgccttttgccattaaagattttgacttcatttcatacaccctattcaaacccaccaggaaccctaaggggagggtgctgtaccttcattttatagagaaggaaaggagtaacttatcgaaggacacctggttattcagtgtcagattggggacttcgggttgtctgtcgagatctggctgttccaagcttccctgcctggtgaaggaatactaccatgttgcatctcccctgctcctcattatccctctgtgaaaatgcaggcgacatggctcattgatctgagggttagaaaaactcccttatggaggtaggcttgctttcttcatttttctttcctcgaggatagagtgaattctgtgatggtttgtgtatcatttttgagtttattgccagaaaactgaggttcaaatttgtagactaaaatagacctttgtagacaaaaaaaagcaagtgattgtgtttctttgatataattttccaaacctacttaatttttgtctttatctttccttaaattgtgtatattcatataagtgctctaaattcttagtataacaggatggattgttattacagagaatgtccttggcacagagcacaaatcctcccattgcctttggggctctggtcacaaagggctgaatacagcacccagagcaggccttggaccttgggctgtcaatcctcatttttttttcttttttttggcttatgttctctcattctagaatggctttgtcatttcctttatctgttggtaaaatccttctcctgtaagaatcagtgagttcttggtgcatatcaggctaaatttgccttctctttgaactcttctccagttttccgggcttggttagtctgtcttctatgttcccataacagtcttccaaacataaatacagtaaaataaggggtatgagtgatgtagtgtccatttctctctggagactttgtgagggcgtgggtgtgccctatacaggtctttggttgcctttgttagtttagcacagtgtgcagtatataattgtttgcaggtgtcattgaactggacctgaataatttaaggattgaaagtgttcaagaagtacccatggatgcttcagtagttcatcctaattgaggatatggggaaagtttgcatgaggaagaaattttgagttggaactttaaggataagttaaaatttagtaggcaaagtgatagcaaatcttaataagcccttattataaaatgttcattaaaaatttttttttttttgagatgaagtttcactcttgtcacccaggctggattgcaatggtgcgatctcggctcactgcaacctctgcctcctgggttcaagcgattcttctgcctcaacctcctgagtagctgggattgcaggcacctgccaccatgcctggctaatttgttttgtatttttagttgatgttttgccatgttggccaggctggtctcaaactcctgacctcaggtgatccacccgccttggccttccaaagtgctgggattacaggtgtgagcctctgcacctggcctttagtttttttatatgatattttaattttcttaaaaatgcagaaagaatcctgcttacttaaaggcagattctactaaattttccatacccctagacttactgcatgtaaaaacttgtttaaagtataaattagccctaaggtacgaatagtatatgtagatgtagtatttgacttctttaggagctttaataacttgaagtccctttgattgttttcaaaaaacttcccagtgtatgtttatattgtatcattaagaaaaattactgagtaagcaattcatgtaatcagtccctcttctatacaacagtaaaacactgcttccctagaccagttctctgggatctctggaaggtatctagcactcagcaagtcctgacgcctttttggaagaccactgagaaactggagtttcctctggaggcaattctgttaattactctccctcactaatccatgacataatttctcaaatgttacgtgtagaatgatggtgcatatcattcagtagcacatcattcagtcagagctcttattgcaactccctctgcatatttcggtacactttgattatataattagttatggaagaaggtttgtaagtggtctaaacattaaaatattaatatattttttgttactaatttgcttgctttagggaaatctacctgtttcatacaggttttgaaaaatatagaaggaaagacttcatttgttgatctttgcatctcaatacttcctgatgtatatttcttttattctttggtttaggtgaaatatctcttttctgacaagactggaacgcttacatgcaatatcatgaactttaagaagtgcagcattgccggagtaacctatgggtcagtgtgtttatcatttactggaaaatttacttgtattctttcaagaaaataagtttatttttagctacttagtcaaatatcttgactttctgatgttttgaaaggataaagtagttactatggaatgtgtttgtaactgaatggatcccaaattaaactctgaacagttaaaacatggtttatttctgactgggtgcagtggctcacacctgtaatcccagcacttgggaggccgaggcaggtggattgcctgaggttgggagttcgagatcagcctggctaacatgatgaaaccttgtcactactaaacatacaaaattagctgggcattgtggcatgtgcctgtaatcccagctactcaggaggctgaggcaggagaatcgcttgaacttgggaggcagaggttgcagtgagccggaattgctccactgcactctagcctgggtgacagagtgagactctgtctcaaaacaaaaacaaaaacagaaaaacagcaacaaaaaaagtggtttatttctgcaaatattaacttggtaagaagtccctgagaatctgtaagtttgtatatctaatctaagaattagatcagttttgatcagaatgtctgtcttttgatcacagttttgtgaccactctgttttccgtttctctggcagtcacttcccagaattggcaagagagccgtcttcagatgacttctggtaagtagattctagcacttcttgacactttagtggaaaagcttttggaataattatttattattattcatttacatttttagagacagcctcactctattgcacaggatggagtgcagtgatactgtcatagctcactgtagtcacgaactcctggattcaagtgatcctcctgcctcagccttctgagtaactaaaactacgggcatgcaccaccatgcctgactaattttgtaattttttgtagagatgaggtctcactatgttgcccaggctggtctcaaactcctggcctcaagctatcctcccgctgtgtcttcccaatgtgctgggattacaggtgtgagaaaccaggctcgccctggagtaattttattagcatttctcacctgcctatttttgtatgtaaataaaagttgcatatatgttgttttgaaagaaaaccagataaaatttaaggatgaacatggctttaaaagtccagggatactataggacttttaacaaaaaaattgactgcccttggttcagtgtttcccactcactccctattccctggaggcagccaacctcagtgcttttgctttttaaaaaattttatttttatatttcaaaataatgtttatattagtttttaaattaaaaacatttaggacaggtgtggtggctcacacttgtaatcccagcactttgggaggcctagacaggcagatcactggacgtcaggagttcnnnnnnnnnnnnnnnnnnnnnnnnnnnnnnnnnnnnnnnnnnnnnnnnnnttgtttatcccaccatctgttcatgggcatttgtgttgcttccaccttttggctactgtgaataacgctgctgtgaacatcgacatacaggtatctgtttcagtctccgctttccattcttgggggtatattcctaaatatggaattactgggtcgtatggtaattctgtgtttgactttttgaggaaaaaccgtgctattttccatagcagagccaccatttgacattcctgccagctatgcacaagggtttcactttctccacgtccttgccaacacttgtgatttttcaggttttgtttgttttataatagccatcctaatgggtatgaagtggtaccttatcatagttttgatttctgtttcccttataaatggtgatgctgtctgtctgcacgtgttttaaagcttatacacaagaaacctgactgctagggctgtgtgtggagtggggccactgtggttgatgacggattgcctgcctggagaatggtcagccaggacccactattgtattaagggatccctagatgtcagtgtctatgggtctttcttgtcagctgttcagctttcttttcataaaaagaactttctagtttcctgccaagggctataaatttggttcaactgttttggaagctgtgtggaggcagtgggccagtgattgtacctttcagcttatatagaatttcacttaaaaccctgttttgggaggatgccctaacctatccacatgtgtgcctgtgtgcccagtgtgcctgggctcaggactactctggtttaatttctgtaaaagataagcatttttttttctggctgtggaagtttcagttgtctggccgcatgggatgtgaggattcttgaaggctgaatgttcctcaagtggatgtggaagctgtgctgtcttcctccttccctgtacctcacaggtgccttgtgctgccatttgttccaccttcccagcacactgttgagggcatcagcttgcattttaggtgctcccccttgcaagctgttggttactgttttctgtgctgttacgtatttcaagttaagactaacatacactctgctggcatgtcttctttcattgtctttgtcttgacaacgttgaagtttcaagaggaggccaggtgcggtggctcacgcctgtaatcccagcactttgggaggccgaggtgggtggatcacctgaggtcaggagtttgagaccagcctgaccgacatggcaaaaccctgtctctactaaaaatacaaaattagccaggtgtgatggtggccatctgtaatcccagctacttgggaggctgaggcaggagaattgcttgaacatgccaggcggaggttgcagtgagccgagatcacaccattgcactccagcctgggcaacaagggtgaaatttcatctcaaaaaaaaaaaatttcaggagggagtggagataaatgaatatatagttgattcttcacattttcttcaatgtgatagctcacagccatcatattgtttcctttcttgtaattatttgttgtcttccctctcctacatatgagctctggccacaaatgattgcatgtatacagtgcaatatttactcttgttttatttgctgtgagcagacactcttagaagttttctctggtggaagtgactcgggccaactgaaatgccagccatagtcttgatccctggcttctgtttcttctccttgtaactattgttccttgtaactgttgttctttacaataactcgtaaagtatcttatttatagtaaactccaggattaattgttttgaggtttaaaataataatacagaattccaagtctttaaaagtttaatgtgaatccctacaggactttaggtatggttcttcttgaaggcagattctttccaggtttgggttagcttaacagaaacttttaaattgaataaattttctctgttctctcttacagtcggatgcctcctccctgtagtgattcctgtgactttgatgaccccaggctgttgaagaacattgaggatcgccatgtaagtgctctgttttacttcgaagacagcaaacagcttacggtgcaactttcttttatatatgcatgtagtattttgcaagttgcagttttagagcatgggaaaagtctcgacttgatgatgtgagtccttctgagaagtgatcttagacaaatgctttgtggtgaacgctatgcataaattagtgtatttaaatacttggtgattttgtaaagtagcacaccaagatcaagacgagttttaccacataattctgtaacagttccaatggctgttgctttgtaaaatttctgcagtactattttgtcacagttgtgaatctaagaggccaagtgtaattgcatatcctttgactaggatactttaggaaacaaaagtaagatatatataataacaggtggcatttattgcattctactgtgtgccaggcaactaacatatatttctttcaacactttagtcaacatttgaatcacatctgggaggtgacaaggaagttaaataaaagattaaattggcgagtagttacccagcgcataaatgtagaaatgagccttaaacctcagtctgttagatttttaactacgacatcacaccacttcaaatcagtattaactgcagaatcacatcaattcactgttattttatttgttatttatttatttttaatttttctataagggaaaaattgtattgaggaacaggtggtatttggttacatgagtaagttctttagtggtgatgtgtgagattttgtgagattgtggtgcacccgtcacctgagcagtatacactgcaccatatttgtagtattttatcccttgcctccctcccacccttcccccaaagtccccaaagtccgttgtatcattcttatgcctttgcgtcctcatagtttagctcccacatttcagtgagaacacatgatgtttggttttccattcctgagttacttcacttagaataatagtctccaatctcatccaggtcactgcaaatgctgttaattcattcatttttatggccacgtggtattccatcatctctctctttatatgtatgtatatgtgtatatattatatatgtatatattacagtttctttatccactcattgattgatgggcatttgggttggttccacaattcacagttgtgaattgtgctgctataaacatgtgtgtgcaagtattttttcctctgggtagatacctagtagtgggattgctggatcaaatggtagttctacttttagttctgtaaagaatctctgcactgttttccatagtggctgttctagtttacactcccaccagcagtgcagaagtgtttcctgatcaccgcatccatgccaacatctactgtttttgattttttggttatggccattcttgcaggagtaaggtggtattgcgttgtggttttgattcacatttccctgatcatcagtgatgttgagcattttgtcatatgtttgttggccatttgtatatcttcttttaagaattgtctattcattttcttagcccactttttgatgagattgtttgtttttttcttactgatttgtttgagtttgttgtagtttctggatattagtcctttgtcagatgcatagattgtgaagattttctcccactctgtgggttgtctgtttactctgctgactgttccttttgctgtgcaaaagctctttagtttaattaggtcccagctgtttatctttgtttttatcacatttttttttattgcatttgcttttgggttcttggtcatgaaatccttgcctaagccaatgtctagaagggtaattcactgttattttaaaggctactctgaaaaatgccaacttagaaaattattcaatgatcaaaacatttcacaactagttaagtcagtataaattagatgtaatatgattaatttttttttctgaaaaaatttctagatttaaaattaggtaaacatgagcaaaattaaaagtttatctttccaaatttccaaaattttaagagacagatatatttaaaactttttctaagttttcatgaggaaatcctacttttctctattgaagttagtgcccatttgttgctagctcttctgaaatgtgagtgtataaggctcgcacacccacaggctgtgatgctgctattccgactcagttcttggtgatgctgatgaagtggtccaagcccacagaggatgctgctggagtctatgttctgtttcagtcacagacagctacagaatcctttcttggattctgatcttagaggtagatccagctactaggctgaagattctccaagcagaaaagtggcgcctctgaagaatcgtctctgcaggaaggtggttttaatcaaagatgtcaaagaaacaagtgtactttgagcactcgagaggaaagaagtgttttcaaatagtattcaggttgagggtaaccacaaaggtgggcaactgaatatgtctgttcaagttaggatggtgaatggaaaaggagaaagtggcagggtgacataggagctccggagactgctcttggtccagtttcacgagcttgctttcctagatcaacgaggagaaagtagcaaaggaaataagatgagcagcgtgtatggaacatcacagaattccagtaatgggctaggaatagcagcaaactattggatccccatttacatcagagactcatttatttattcactcatttcacaatctatttaaggacatcatttatatgaaataccttgctcttggtactaggggaagagacgaataaaaaacactcaaaggattcctgttcactggggaagcagacatgtgaaattcttagaagccagtgtatgcttttgcaggacaggtaaggtgcaactccctgaggaggtgattttggtttgtgtagacagagaggaatcccattctctttggtgactgtcatggctaccataactgttgacatgggagcagtgtatttgcactgtcataaaggtgggatgccatagaaacccagtggcctggggcaaatccttacttggagaagagcttctctggggaccccctacatgctactgggattctagtgtttgaaagatttcaaagcttggttcagttcatttctgactctcacaggtgttctttccaaagctggcccgggactggtgttttgggtccctgtgacgttttggggttttgactgttcatcccacactcttcttgagcctgtcctctgttgatgtttgaatggagatctgagcacagctaatacctctcccattgccttcccctacccactgctttttcctgactcctcccttggtggccatggtgagtggaaagaactttaggaagaaatcccactgtttatataagttagtgatctttcttcttctttcctttcctcctcatcgtctgccctcctgagccaaatttctttttagtttagtgggaaagccattgagagtagggacaggtgcaacccctgtgaaaaggaagccctgctgtggggacattgtgatgaccatccaaacacagagacttcaagggcattttaatctggatactcatagtttcagtacaagcataatgaggaattgatcgattggtttgggaatttattttctaatttttagtaaaagcctcctagcctatgtgtaccatttttaagctttcttggatccttgaggccttctgaggtactcttcatctcagctactatgttaactaaactctttgacatttaacatctagctgcactacaataatgaagaccatagaataggctccaatatttttctttggggagatgtgggattgaattaaatgtacccattggaggtttttaagcagtttaaacacagggcctattagattacttgttcattttgccaaaatgtgtctgtggagagggaagaagtatttgaggatttgcggctgcacatgccccacattctcatctaaattgtcttgggactattgactaaaattaaaacatttggtccaagaaaacccttactttcctcccaagggaatacttccatttgctacagaattttctttttttcctatgtcatcatttcaaattttctggttcctttaggactgtgttaagctttgtgtgggctgatagccaagatggaatttggctcttagagaatcaacctatgagaaattttggaggacaatttatgcaaccccctgcttacattgctaaccagtgtgtgggataaattttcaaaggttcaccaaggaagaagatataactttcttttgaatcattatgcctaagatttctgagcttgagtcttcaagaagaaatcacttatatatgtatatgatttggataatttgtagctgcaattttgcttgcaaaacaattttaaacatgtatcattttctgctattttaaattcaccgaataagtagaaaatattcatttctagatatatggcattttgtacatattataagctgttaactgaaggaaaaatatagtatcatcctgtttttatgaggtacatacaataggcaaattcatagatacagaaaacaaaatagaggttactgggggatagagagaagagagaatggagagttattgtttaatgggtatagagtttctgctggggaagatgaagttttgtgtatagatagtggtgatggctgtgtagcattgttgaatgtatttaaaatgccactgaattttatacttacaaatggttaaatgatagatattacgtgtatagtttaccacaatacaaatttttaacatctaagaagatacacacatacatatatacacacatgaatataagcatccataggcttcagattaattttgtctcttctccctaatttattatagaatgcaataggaagaaaaccaatgataggttaattttattttaggatttaaaaaaaatcttcatggattttgtctggcttaccatttgaggtagaaggctttatttgtgtgtgcaattctttataactcttagaaaatatctcactactaggtttacttatttgtaaaatctaagacactttttatgttgtttcattacgggacaaggttatgttcaggattggaaaattctcaggtacaggggaaggcaatcttgaattgaagctaaattctcacataaagtacttttggggaaaatttcttaccatttttgcaatgcaggccttgaggaatgtgtaaattccctaagctcatgactttactgaactataatttaaggtgccttttctcttcatgataagaagtagccatgtaaatagctgtgatttgcttccataaaattctgcttaagtcacattcacaagacagagaagaaactaaaaatattcttgtggaagccgtcattcatttatgactaaaaaaacagaaaactccatcaaaagaggaaacacatagctgcttccttcacatgaagatataaatctatctcaattttatagccagttgcctatttaaaagggatgcactagaacactgacattaaaataaccccaggacaaggaagcttgcttatcacccctgccttgaatgtaattctggaagtgctagctcctgcagacaggtgaacattgaaagtttatatattgggaggaaaagggaaaacttctcatttgtgggtgatataattgtctactttgaaaacctaggatagtcaactgcaattcagagaactagtaggagctcagtgacaattggatattaacttacaaaaatcaatgtttctacttacatcccaacaagaaactactgtaaaatgtaatggaaataagattccattcataatataaaaggcaatagataaaatgccttacacagtacttcatgtatagtggtcactgaaataatttttgagcaaataaaataattaatagacgtgccaggtcttatatttagaatatttagaagcttttaatacataggaagacacacttttcttagatgggaagacagcattattttcccactagttataaatgtgctctaatcccaataaaaaattatatatttttttcccagagagaataagagaattttattaaatacatatccagggcaattctggttttcgttgctgttcaatattaatgagcaagggatgcactgctttacaggtgttgagagattataaacttaaagaatagacactgtatagaacagatgtcggggtggggaatgggagcctggagatgggagcatcttctgtttatggggcctgaggtacagcagtgagggaggcagaacacacgcttccggaggatcttgcgagagtgaggcagcagcacgtgggtgaagcagaagcacagggaggcggaagcagaggggcaagtggaagcacgtggtgaagtgcaagcatgtggggaggcggaagcacgtgggcaaatggaagcatgtgggcaaggccgaggctcctggggaggcagggtgtgtggaggtacaggaaggctctttcgtcttttctctccccatctcttgagctaaagcgcaggagctgcattccaagagaaacctggggattagtgcgcgtcaggagaaccggcttggggactccagaccagagcggtaggagggggatctgaggtccatattaaggacctctaccctgtcctacagggagcaataggatgactggatgttagttggggatctgcttgtgtgagccctggtgcctgttgaaggtgttgtatctgacactaatcccgcctcacgtttgcagcccacagccccttgcattcaggagttcctcacccttctggccgtgtgccacacggttgttcctgagaaggatggagataacatcatctaccaggcctcttccccaggtgagggctctggccggatgcgccctgctggccccttctcaggacacctgggtgttgcagttattcttggaggtgttgccatgtagtccgtcccacagactcggctgtctgctgttggcctcaccctgtggccaggctgtggctacaggtgcaaagccgtagagagcccgggatgggctctcctgactctcatgactcttttttaacagcaaagggaggaccccggttatgttgcatctcccagcagaggtgattgggcttgacagagctctgaagaaagaacagagctggcttcttcctcatcctccccacctcatagattttccgcctgctggggaagctgtgcatgggggtactctctacccacttcctgaggcttgggaatcccacagcacaactaaaatactgccttgctcagaggagatgtttggtgggagtcatgggactattaggttcattggagagaacttgatcccaagcgagaatagcaggaatagaaatcattcttgtcctggtgaattagcatatatccaagcctcccatctaacaggagtgctcatttcagaaccctggtggtaggaaaagcaagtgcttctctatcctgagtctttactattatgcagataacaccaggcctccttcagtagagcggattttgttaatttgaaaagtgacactaaacagaattctgtcactaccagtgatatgtcaatgtttcaccaactcccacttgacagatgaagctgctttggtgaaaggagctaaaaagctgggctttgtcttcacagccagaacaccattctcagtcatcatagaagcggtgagtaacatgcgtgtgcacatttcagatcacctgcttttgtgaagattgtgtgtgtgaaatggcatgtctattgtaaatatgatagctaaatttctctttcagtgaaaaattaagacctgtgacaaactggagttaatgtgattatattagcttgttcgagttgttttgcattgcagtattgttttccccttcaagatgcttttccacatgtctttcatacactgatgtgaaattatttgtagcaaagaacttcacgaatctactctttgttctataataattgggaaaataacttagcggcccacttgtctttgagggcaggttccacatctctttgtagcctcagagcctaagagttcttactcaatgaagcctcacagtccactgggcttcagtctcttcagctgggagaggagtcagcattaagatctctctctctctctctctctttttgagacagggtctcactctgttgtccaggctagagtgcagtggtgcaatctcggctcactgcaacctctgcttcccaggttcaagcaattctcctgcctcagcctccggagtagctgggactgactacaggcacgtgccaccacgcctgactaatttttgtatttttagtagagacgaggttttgccatgttggccaggctgatctcaaattcctgacctcaagtggtccacccgccttggcctcccaaagtgctgggacaggcgtgagccactgtgccgggctttgatctcttttatctatatgagggatcccccctgcaactggagtcaaggggtttacatgttttctgattttttctgagtttccttacctacaggccaaagggagaaatttagtgataggaaaataattatatcaaataggaggtcaaatacagacccttggaatgggcaacaggggaaaatgatggttatgactggtgaggcagtggtgtttttcatgatgaccagttagaagggctgttttattgttgtctgcattgatgataagggtctggggctagtccctgccatcccttgcctttccctactcctccatttggggaagacgcagggattatagtttttggctttatggatgcatccttaaatccatagacctttaatgcatttgaaattcacttccaaatggtataataacttcgtatggttcctgacttgggagtactgtagtaagttttttcttttagttatatgcaaaacctataaaatatcttatcttatacaaagtacccatttattggcatcttcagtttcttatggagtacagagatgagatcatgtgatcatgtttacttttactatgcttattttagtcaacaaagggaatttagcttaaggaaatgtaccatcattaaaagtggaatgaagtactgattgaatatagaatttcccgtacagaagcttttttaaaaatgaggtctttttccccccttcagttggaggagaattttaatctgaactataggattttcagttgtgtgggtgccaccgcatgtctctgcattgcaaaaatggaggttgggggttggggagcttggatcataggtgagagagacagaagagaacaggcgcttccacttcactcacaatgccaaataaatgtggaacctagagagcctattggtgttgtcctcctggtgttatatgctgcattgacacctctttgttacctcattaaagttttaaggtcatatttctgggggtcacaaaagactgcctgattagttaggactcgtagataacagtaataaaaagaatcctactcaaccattcatcaaaccaccaattctcaaattatagtttttgcatataagtaaaagaaaaaacttactgcagtactaccaagtcaggaacaaattctcaaattcctacatatttacatgaaatgtcctcgccaatagtcagaacagccacatccatgggctgcatgtggacgtggttgatataactgtgagagagggggtggctcctgggagtggcagccctggtgctgggtggtggtagtagcactgggtgtcttctgaatggggatatgatggaaagttaggacaggctgtggagaaagggaactcggaactcgtggatccagagaagtgaataaagattgatgaaggctggatgaagtggatcattagttgttttgtaggatgcaaagagaaggagtggagagttgtgggtgtgaatgaagataatgattccgtcatatacttggtaatttgaatgtgttacttcattgattacttctctgagccctaagagatgagtgcttttgccatgcataagaaagtcacacacttagaggcagaaactggattcaaactcacatgtattgggtgccaaaggccatgttctttccactgtgaagtgttggggaaatgaaaagattagattaaaaatctgaaaatagcatgcgcaccatctggaatttttagatggaaaaaattgtgaatattgacattctaacttgaaagaacccaaagaaaaagagcgtttgattgattgctctgagaccaggtacagattcaccatctcttatctgcaaattcgaaacccaaatgcctttgaattccaaaagatttttcctaaatttggtgaagagttatttggcagcaaaacctaatcagaactgacatgaagctgtttatgatctttatgaatctcatttcctgatatgcatacattttgctgtagaaagcggatgtgttgtgtaccagcatgttaccccagaccctgctggggacattatgatagatggtctagaatatgtctatataatttgtaaaatcctgaattcagaagcataactgggccaaaggtttctgacggacctgtgcagctggtgtcctctatctccatctcttggaagtgcctgcgctccccaactgttagcactgaagaaacgtgagaagcttccaccagaagagggagctctgaccccaccagacttgtgagaaaacagtacatgttgcaaagggctagaaggtgggaagagagagagagagcatatatatgtctgtttatgcttgggagacaattgctttgagattttaatactttgcacctcggttaagagcctatttttcttcctttagatgggacaggaacaaacatttggaatccttaatgtcctggaattttctaggtatgtttctctttcatacgtttgaaataaaataattatatttatttaccagcttcatcagagtgtttacatgattgtatggtatgattcaatatattacttaagtattaaatataataaatgtatctccataaactcttttcttcttggaatttgtgactttcattaaagaaagtgaagtaggttatttttctttgttttattcaagagaaatgctctacttccatgtcctcctttttctttagatttccagagcctgatgttcttgcatcagcagctgcagacatgtctgaatagtttggagcatgtgatgggggcattattttcattggcgtttcccaagtcccatgaggtcattcctcttgctccatttgagcactcctctggagatctgagaaactgacaaatgatgacagatgagatcagttcatcccattagaggctgggtccacgtagggaagttttcctggacttattcggaagcattcttccccagtacaattttaaaaagttagacccaggaatatttgttggacttttttgttcacatagaacattcatagttggttataaggaaacatatcttaattttttgtttctttgcctctttttaacatggaattgtcagtactaaagcaaagttctgttgctatctcaaaggcatcttttcctattattaaaattaggtggatttttgaataacctttgttaaacagtgttataaagctctgtctgctttataaactatttttaataaggattagttttttatctttgtgtaggaaatactttccagccctagtctttagttttaggtttgcaggcatcgacttggaaccatggggaggggaggagggatggctgattacggtggtggctcatgtaggaagtggtgacagtgtccctgcgtgtggaggtgagcgacgtgctaggcatctctccaaactgtgtgcttcatcttttattggaaactgtgcagtgccctgtgattacattaactgggaccagcagttattggacaggcaaggaggaggagaaaagggagttagataaaaacaggtgaatattggtagagacacaaggatgtattaaaatgtatatatgggagaataagaaagaacagaaagataatttgtggttacagtggtgagtctatttctttttcatggactcatctctttcccagtgccacttaatcttgataatactcccgcgaagtacttgctttacacattgagaaactgaaacacgggtttcaagaactgctaggagtgcccacctctaagatagttgagagagaatgcaaatccaggtcagctagagcactataggttaggatgtgggaatttacccagagctgaagagagactctccccgactcttagagacttatagtccattgggaaccaccacactgaaaggccacagagatgggtggtctagggccctctgtagttggagtgtgcttcaggaggatgaaatgttggcaaaggaggatcagaatgtgtagaagaggagaatggtgagtcccgtgtgtgctcgaagcctggtggtggttcatgggagggttggtgggagatgaggtgaggctgcacaggtggacggagagcagtaagaagaattcataggcggtggagactcactgagggctcggtgagtgaggatgggccatgaggaaagacgtgtgaggaagtgtagatgctgcggtgaggggagagagagttccttggtgctaaattgggagtgttctgcgggtttgtgatttctttctactccaattaaaagatgacacagggaggagcttctgagttaagtggatctatactgagtctcccactttcctacctactgggcaagttacttgatagcttagaggtggaaaataaagaatatttttagagagtagagtcagaagtcaatcagatgtggactgtcagtgctggaattctccttttctgtttttcctactgcaaatagcggtcctagtctattttcatggcagggaaagaaataggcttatgttcattagatgtaaataaaaagagtaggagatacacagttaggtcctactttgaagaaaaaggcagggaaagatagaccttgttcatttttaggaaccccagacccccttttgttttgattggtgttcagctgtgggatatgcatcctgtaaacagaccaatgatgactttttttttttcactctcccagtgacagaaaaagaatgtctgtaattgttcgaactccttcaggacgacttcggctttactgtaaaggggctgtaagtaccggagaagcgttgtgcgtagcggagttcttggcagctttgttaatctgccgcttttcctaactgctttcctcatcattccctgattgtttgtccagagttgaaagactgtttcaggtaggctgtgaagttgacttagtagtaaaagcccactgaagataatggtggttcagggcagtgtggcaaagatggtcagtgaaaagcttactgaaatcgttggtttcagaaacagtgactccacgtgtcatgcaaaatccttgaatgggaattcttattccagttttaccagcattgtgttttgactttgggaagacaaagtaatttgtgttgacctatgataatcttgagtattctgatatatattggttctctagcacctcttcttctcaattgttatgtttttttctcatacattatagagagacgtgttttaggtacaaaggcaatgtccatgtgtagctgcattattactgccccttttagtcagtttcctaggtcaggctttttgtcctgtataccttctagtaaccaaatctaaatggtttatctcaaaggaaagatgttattgcttatgagtcttacttatagaactagatcctgttaaattttagtcttatgtatcgagggaaagaattattaaacttattttatttgactatgtcaagaatacagagctctcctaggattaattagtggttgacagtattactaatctttaccagttgtggcaagaagggtggttttatttgagtacacgatgagtagagctttttacaaatgaaggaatgcatgggaattctaaaggcattatatttggactcgctaaagaattctgtgtttatggtaaaatgacttcaattaagctcatctaggttttgttctcatatgatatatttttgaaactttttgtttattcatttgccattgtgttctaagtaccacatcgagtacaacaggtgtcagtgtgaggtggtagagagaggagggctgtcagtatagaagaggtacatacgaaaatgttgcaaaggtgtgttgtatttttataggatttaattctctccaaaaccaaactcagtttaaaaaaatttttgtaatagcctaaaactatgcaatttgtaacacatttgatggattatctgtgggatctggtcccccaacccttcttgtcagtcatggaaatagtcataggcagatgggctgtgcacctgtgtgtttcttggcagaactgagttcagcgcccaatgggttgtgccctctgtgcttaggagctcctcccgtattgggaggcaggattgtacttgagtaatttgggatgtgcattttaccctttctccttctgcgcaaacgcctgataaactttgggatatgagttttgcaaattttggtgaatataggcccccatgtattccaatgattctcctgtatttctggttctccccagcatatttttgtttggcttttaagataacagattttggttttgttggacacattcatacccaatttgttttccaaagctcatgcctgagcccagccaaatgctaaattcctacttacccactcgggtattctcatgcatgttagataaacagaaacaaagccatgcttagtatgctggctggaaggtttactgaaggctttgccagtcacaatgtttccctattttataggataatgtgatttttgagagactttcaaaagactcaaaatatatggaggaaacattatgccatctggaatactttgccacggaaggtaagtggaatttggaaatgctgtttttggccattggagctgtactttcaagcatgttgtcttgatttccaggggcacattcttccagtgcctgccccatcccctcctgtgcccatggcagtgacaagatgcatagccaaatccaaactcatttacctgtagatgcctctgtcactcatcagcagtggtgcagagggagagacaggccaacgcacaacgtgtagaatcacctttagttactagtccctttctcagaaaactcatatggttattttcctgtccctctcttggtgtccttatgtcactggcttatccatgacttaaggaaataataattcatggaacccatagtgagcaggaaaggagttctctggaaggctataaacaacactgatgtcaggtgttcctgctagcgaatgtcatgatagctggagccacactcaagtgctaactgctgctttctggcctctggctctgcgtgcatgcacatatgagcacatgctcacacacacgcatgggtgtggctgcctgaaagcctggatctttcatgggatagcacgtggggcctttccttgctgtcttgaaacacacttcccacctcctctgcttgctgaaacctgtttactgcacatggatcatgcacagctcccgaacctctctgccatggagaattcactcttctgacttctcgcgcactctcagccttacggaagaggtagtttatgttagaatacaggagagctgtttttaaaggtcccttggtagatgtgggagtgttgaattagagtgacctaaagcacagagtctcttcaatttttttgggcatgctgatggaaaagggagcacaggctgtcccctaggaggtcacgcgttctgcctgcctccattcaccagtggctgtcttgcaggcttgcggactctctgtgtggcttatgctgatctctctgagaatgagtatgaggagtggctgaaagtctatcaggaagccagcaccatattgaaggacagagctcaacggttggaagagtgttacgagatcattgagaaggtaaccgcacacaatacagtcttttcagctccatgaaggacttaaccacctatttcacaaagtatttgaacaggaatccttttactatgtagggatgttctcttttcttgtgtcttaatgaaccgttagctctgaatcattttctttgctttaagaagcacttaattttcatggtctttctgaaagctctagccaccctcagctaaacattaatgatagcttaagaaatatcaggtcaaaaacagcatcagcgactttctgggtttgcttaagattaggcttaatgagattaactcacgctgttgagttacaggagcaatcagaatgctgtggaggctggttagatgttgtacatgctaagctttctcgcactaacttattctaatgatatttaaactttgccgttgctactccacattgcctactttgattttgttgttgttgttattcttttcagtttatcctaaggctttagctcactttcaatttattggtttccttcaagtgtgggagctgggtttcagctttttctgtctcatgttggcagccatagggccatccaatttccagtttctataacttttttttttaaatatagagacagggtttccctctgttacccaggacccaggctagaatgtaatggtgcagccataggtcactgcagcctcaaactcctgggttcaagctaacctcctacttcagccttctgaatagctgggactacagtctcatgctaccatgactggctaagtttcatattttttgtagagattgggtcttgctatgtttcccaggctggtctcaaactcctgggctcaagcagtcctcatgccttggcttcccaaatcccaaagtactgggattacaggtgtgagccaccatgtctggcccagtttccataactttgaaaccatcacttatttactgttttcattcctttgttggtttaaaaaaattctcctctgcttttttttactcagtttttttgtttaagttttatattcagttatttatattcagtcattttaatgtactgaattaaaatgaactgaataaatctgaattcaggtgtttatttgccctgttttactggaaatagccaaaattatttttagaattagaaaaaggtgattaaataggtgatgtgcctgtggtggatgctcaagagttggatcttcccacagtctgtgaccaagtagaggtgctatgtcctggagagacttgggatgtgagtacatggagcaggccgtttgtacagtctctggaatttgcccgaccagcaggcacagtgcgggcagctggagggaaccaaacatccacacccatcctcagcatgagctgatctgccctgggcctttaagaggaccaaaaggggcaacattttatagctaccctcaatcttaagatacttggattttttttctctcactgttaaatccttagcaccacaggtctcttactcctattttgccaggtaagtgtattatctagaattagttctcctcctttgttaaatgtgacataatatgctactcattagtggactgagaggaagggctcaggtactgtcagtgtcctcgggataacctgcccatctgctctgctgccagatggcttctattctaacaagcccctgtatcaagaaatcagtgatgagtactgggctgcctgtgtgtgtagagtgagtccaccattgcaaggcatttggaaatgccatccatccagatgccatctgtagacacaagtataaaatagaggaaatagaacaactgtctcagaaccgtttgattgcctttctttgtcagaatttgttagtgctgttcttaagtatgtgccaatctttaactgaggatattttttcaatctagaatttgctgctacttggagccacagccatagaagatcgccttcaagcaggagttccagaaaccatcgcaacactgttgaaggcagaaattaaaatatgggtgttgacaggagacaaacaagaaactgcgattaatataggtaattatttttacaaataatttcctgatgctgggttttgtatttgtttttcaagtatcttttaaatgtgtctaaatgtttctcaaattcattgacagatgatgttttataggaatcttcattcacaaggctaaggaaaattgacctaaatcaaatgaagatgccttcatgcctgttacaaacattaaaactatcatagttcctggaaaagaattagacacacttacatagggcatagaattcaagatttgacagctttgattttcttattgctttcttcacaaaattttagtctgagactaagagagcatgtttttactaggtttaaatatgcgttattattttatgtaattataaccattttaatggttttgcccattaatgggcttttctaagagccttgcatctttcccttcccagcttgttgacaacttccttgactgcagagcatcacagagatgaaaattgaagaaaaggaatttaagtcaggataactctgccgttgttaaaggagcacgttttaagtttgaaaaggagttgaagctactcattttttaaaaatctaatcttgattatttgaaacatttaaacactatctggtactttgatcagcattatggtgtaacaagacctggtgcatatgtggtaaaatgaacactgcataacttagaatagcttgctagaagtagactctatttctatatctgtttctatgtcagtgctctgtgttttaggaagaaacctgctagagcctttgtatttaagtgactatagtcctcttcagagtagtcttcttggaatattctcaacataatccaatggtgtccctttcctgaaaaccttatctttgaatcagctttgtctctcatgtaacctcagttgtaaataatacctgccttcttggataaatttgatttaaaaaaatagacaaaagccatgtaatcatttcttgtcagggatatagctaattaaatggaagttgggctcccaaacaacggaagttaagctcacaagagagtaacataggattcataaacagtccctgaagaatcagccatagactttgtccctggatttgtgctggttgtcattcagatgcatggttttggagaacagtatgatggtattttagtgcagaatcatcactgctactagaaaatacaaacccaagcttacagccctttgatgatgtgtcagtagcatttttacaaatgaagaataacacatttgctttttgtatgctatatttctgtataagtatatacattgaccctttatgtgttatttttcatataagtttggcctaaaacacctgctatggatctgtggcccctgttgtttgcatgctaagttgactgttaccctgaaatacttacctaaaatttaggtgatatgctttccaccctattagagcaatgtgaaaaaagtggataacccctcaagttaaaattgagctgtaaagtggtaacctttcttagttttccagatcttgagcgttcccgctggcctaataacctatgcgtgtcactggccctagactgaactaccttcagtgtgttcttggatgtgccctggctggaaaagcaccacagctccctctcactgcctctcatccacaccgcccggcccctgggagcacacgcagccctttttcgtgtgtgttcattttattatacctgagcctatctagctaagtttgggataaacacaagagaaagcaaagtgctgaaaatcaacccagaaaacacaaatggattattactcaaaaacgaaagttttacttgtatgtgatgaggctgctctgagccttatgagataattgatacctgtccaaacaattttttaaaaataacgattgtattattttgtactttttttctaagtgggtgtagtaacgtgtagtgctcatgccagaaccgctcacatcatttgctatctcttaattgatctttcttagcaagtactctccaagaccgctagaagatgatgctttataagctgaggactttttgtcaaagtcttatgtttatcctggaggctttctctattcacattttatctagtgtatcagtcagattcaaacacatcttgggtgttactaagtaagcttctaacagctagacaattgatttctttgagagagctatgtctgaattgtttcttcacttcacctttggaactgaagcttgtagccttgggtgacgccgagaatttaaatgtcgtcttgtgatttaaagtatctgtcaagcctacaaatgatgcagaaggctcaggaaagcatatacgtccggacattttattagacttttcagtgtgggaccacaggcggcagctgtcagcagcatgaggtcatgctctagatacagagtgggtttctaagcctgttttctagtcatatagccctcatacccctggtagtatgaaccattatggacctgtctcccataatactttacattttcatgcatcctgtgtggattttaaggtatccagaagatatttgggaagatcaagtatctagcagttctccttctagatgaaaaaagggaagcagagcaagtaaatggagtgtctggcaagtgccaggcactatactaggagtgttttctgaaaactctttttttaatatttacatatgaacattcttatagctcgaggaggaaattctacatttcccagggctataccctacttaatgaccaaactggtactaggtctcagggctcttgacttctggtgtggggcttatttagagggattcacatagcttttgcaaaaaatgctttctgaaatttgatttagaagaccacggagaatggtactacatttcatccattccaaggtgcacattgtttttacattttaatgtctctgaaatggggatgtcgtatagttgttgactcttagcttttaattgtcagcattatcttagtggtatgtaccataagagttcatctttagatttggtgacattaattatctttggtgtttggaggtgttggctctttttagagtttggttttttaaaatatatatatctatctcgtagtttgagaatttatttttaaagtttaactttttattcataccttagaaaaaaaacacacagtcaaatcaagttccaagacatgtgtgtctcctgtgagccagtgaattgtatgtagatagacaatcatcttgtgtataggttttagtagtttgaaattggcatgttgccagaatcctgcaacactgtgcttgaatttatgctaactagctgtgttttgaggagttggcgattttctcttttagcttaaaaatttggcatcagctggtctaaagtgaaatttcagatgtagcccttgtgaatttcgtagtggtcatttccttattaccactgaataaaacgtctattaaatagttatgcaatagatgtggagttttcgcagtctgtaattttttttaatggatgtaggatgagtgagaacaaaatcctagtgtgtattccattttaaagtagttaagttggcattagctttcctcttaaaccatttctgaattgaaatttaaagtctttcccccaccctccctgcattttgttacccatcatttgatacttttaaaaccatttcttatggtcttagaggtttattttttaaattttaatacattttattgtgtataaggtaaacaatatgatgttatgagatacatatagattatctttgaagtttaattttaggaagtgactcaatatgtcacttgcccctcctgtaattgcctgtacattttcttgttcattaaaaggaaggcgagttgccattctcaggtgaagctgggctgtgagggtgacaacactggtgatgttctcaatcttactgctgtttttcacagaagattcagtcctgtatttcttgattacctgcagctaacattgccaggtgctccactataagcttgggcaacttacattccacacttggggcatgagttaattatgagacaaatcagagaatgaaacagatgaggaagtaccaattgtgcagtgtagatgttaattatgactggcttttgtaatagttactagcaaatgttatctattatgtgcccgatactgcactaagtcctttacagatgttttatatttaattcccttggagaatttaaaaggcattatccccttttaaagataaaactgaggcacagagagatgaagtaacttagtctaggtcatacagatgtgagaaagctgaaaatctgagcacttaaccacaacacacagtgttcatttctcagaaggaacaatatgagttgtaaaggaccagggaagtcttcctggatgagaggagtttaaaacttgagccttcagagtttgtttaaaacaaaaatgactgagaatagaatgggtcaggatgtcccaacgtggggagaagccgtgaggtgaggttgagggagcatgttcttctgtgtggcgagggttcctgagaagggcctgaagggtctcaagggagaggtgcccaggcgtgtgctccagggacaaggcctcagctccctggttctctggatgatgaggggctctggacgggctgtctttgatcccacctgggatagcttaaaagaccgtcttttgtcatgcattcttgttgtctgccagtgtttttcatacaggcaaacactgactgaccagattctctgtaaagctattgagaaccagtaacatgctcactgcgggttggtaccatgttgaatcctgtgatgggtagcttggtggatgtgatctcaggatatatggtgtggaaggatacattgttcctgactttttcaaaaatgtctccagagaaatctggatttgatatcaaaaccagtgttctccttttttaaggaggaaacaggttgagagagctgacagatttggtttagtaatattttctagtgtgaagcattatcttgtattaaaatcaagtcctgccgtaagtaccatagactatataatattttggtttctttgaatgttgattatactcaggtagtagaaagactaaacccttttgtagtatactgttaatttcaactatagtaaaaaatgaaatcccagaggttctcctctcagtcattttatggccgtcttgttagattgcgagattaaagaagtagacctcaatttacaagtttggattgacattctatacctggctcttctccaagagttgatctcattttatccaaaaacattagaaatcaagcacaccaaatgtggattgacacaataaataatttgctacattagttaagccacaattaactgggttaaacttccctggtctgtctagtgcgagtgctccaactgataattctctaaacaaaatctcacttccgtatccaaactaaaaacagcaacaacaaaacccttaacctgtttcttctcagaagcctttagttttgtatatttaaattcatgaaagtgtcagtagtttttttttctctctccccctgccatggctagaaaaaaaaagactgagtttttccataatatctttgtgtagcttcagttgtcaaatggcattttgcttaaattgaaaaatataaaataaagcagcaagcgagggcttaaaaattacagccagcttctgcagctgttgttgaagtaaaaaactaccagtaaatccttttgcattagttacactaaatttgtaacagtctatattgcatgaagttgctgaaagtctctggggatgaagaaagaataaatctaacatagagggaaatgattaaagttgcaatatccctctttgcaagtgaaaagaaaatgtagatctcccttctggacctaatctaaggacttataggaaggaagaatgcatttgtaaaattttaatgggaaacaaagagtttgattattctagtcctaccaggcagagcttttaatggcattttgagagggtctcagttttatccatcactgttgttaaaatacagacttgaactagtttgtaaatgtatagaaaattgcttcttgttcccccctcctttttttttgttttagagatgtaacaggtatttgcccatgtggtattgtgatttaaaattattcagtttgttttggctttaaaaacaatatgtgtttgttttaacaagagaaataatctgattcccttgagataactgttgttaacagccttgcctatgtctttttcatattgccttaaaaaattaacatttggatgaaaagccataattttgcgctttaaaatttgatcttggaggtgctttacaaaatgttctacatggcggtccttaggaaggatgtactttctgaaatacacaaacgaaatttttttactgtttccttcaaccccttcattcccccaaaaacccacaacatggtttttcttggtcttaatttttgtctatcttgaatttcattttgtacctgttaggaggatttctcagggatgaaaagggaacctgctagtaggtctgagcacataaatgcagcagttctgctccttgtcccttaggtaaatgccgtcttctttgctagccacgtgtagcatctgtgagaaggatgtcttcttccctgtcctgtgaggagaatccttactcctccccctggctgtaggaacagtactggccaagccctcccttgagattgtcacctgcttagttgaaggctgttgattgatttcccttttctataatccttaatccattatcttaaggtgctgagacaaaactagttgtgggggccaatattctgtggagaaggatttttttcttgccttttctcaatgagagagattgagttgggcgttggtggaaagcacaagtcgtcgctaaccccccaaggcactgagaggatggcaaggtgatctgagagacaggccagtgccctggcggacacctctggtcttggagttgcgagagccctctcctcgccaccgagggtgtggattggaggggaggcatcctgagaggcgctcggcttggtccatgactgctcacccagggcaaagtatgagtaggaaagagcccagggcttcctagaaaatagttctcctgctgggagggaaagagaaaatactatctcgcttaacccatagagataactttactgaaaaatgagaaggaaattgttaagaactaggagtactttcgttccaaataagcctttaaaaaaaaaagcctttttaaaataacaaccaaagaaagatttttttgaaatgtggattactttaaatttttcacaggaaaagtgactccctcagtgtattcctttgaaacctgttgtgagaatcagctgctgtcttaaaggaagggagggagctagctatcccagtgggtgtgtgtgtgctgatttaggggcaccattggggtccactgccttcctgaagtgttcactgttactttagacgatccaaggcttatcttaatgttatacaaggataacagagataaagaaaaatccactaaaaattgggaagtatttattttagcctttagttataaagacattcccaactagttctattcaatctgtacaagaatcaaaatcaacttacttttcctactcctcactgttaccctattcctctgtgtgagccaataggcttaaagtggcagatataaccaaggaggttgaatttaaggagctcacagaaggaaagagaaattcacatgttgtctcttcctccacttcagggtattcctgccgattggtatcgcagaatatggcccttatcctattgaaggaggactctttggatgtaagtagtttttcaaagttgtatttgctttgctataacagtattaaactctttctttctactatcattgataatcagggatcatgttttgctaaaaaacagttatgaaaaaactgtgtttattttctgtttatatttatatttaagaatggatgtcagaaagccttatctttaaacatcaaaacagtaagcttagaatattgcctcatgataatacttttattcatctagaattgtgcatttaaaatgggatagttttaatctgatttagctttaatcattaagtatgaaatattagtggaacctattatgacctacattaaatggtgatggttaatttcactataagttactaaggagacatgtatgattttctttctagcacaaactttagaataaaactaatattcaagtgttaagcattgtttaaatttatatagtgaggccaggtgcagtggctcatgcctgtaatcccagcattttgggaggcggaggcagaaggatcgctttaaccaaggagttccagaccagcctaagcaacacagcaggacctcatctctacaaaaaatggaaaaattggccagccgtggtggcatatgcctgtagtcccagctgcttgggaggctgaggctggagaattgattgagcctgggatgtggatgctacagtgagccgtgatcgtgccactgctttccaacctgggtgacagagtgagactctgtcttgaaataataataatacattcgtatagtaataggatacatgtatacttaattctctgatgtcccaatgctgccgcatgaacccaccccatcatggcataaagccactgaacagaccagcagtgggagctgatttgagggtcaccagcaacctgtgaagtggtttgatatgaaaatatgagctgaacaatgagattccacttgtcagaacttttaacaagggctttgttactggcaggcacccatagcaccctttcaggcagtatatttaatatttatatttagccaatgccaggggcagatggcacggttaattactcttttaaagggaggcaataaagtacagagctttctatacttgcaaattgagagggccataactcctatcgtgaacaccaggatactctctaccccttcatgagaccaagggcaggaggcagggggagagtccgtagttctgtatgtttccaaggcaccactggcaagagaccaccctctggcgtgagtgcttcagaattcatctcggtacacctcctatccttgttcatgttactgcctgcaggcagcccagagtcccaggtcatacctcatctcctggagtctaattctcacatgctctgaggaaatctctcctctacccaagtgtttcagtcttccccctctcacacgtctttatttttctccatggaacctctcatcattggaaatactatgtgtgtgtgtgtgtgtgtgtgtgtgtaaattgttgtgaaatacatcatttaagtgtacagttcagtggcattaagtatattcatattgttgtgtaaccatcaccactatccatccacagaactcttttcatcttcccaaaccaaaattctgtgcccctttgaacaactactctccattcccacacctacctcatcccctggcagtcattctgctttgtgtctctatgaatttcacagctgtaagtacctcgtgtaagttcaatcatatagtatttgtgatttttatgactagctcatttcatgtaacataatgtcttcaaggttcatccatatcggaccatgtgtcagaatttcgctcctttttaaggctgattaatattccattgcatgcctatactacattttgttgattcattaatccatcagtggacagttgagtagcttataacttttttttttttttttttttgagacgaagtctcactctcttgccaggttggagtgctgtgccaaacgaggctcaccgcaacctccaattccttggttcaagtgattcacctgcctcagcctcctgagtagctgggattacaggcatgcgccaccatgcctggctaatttttgtatttttagtagagatggagtttcaccatgttggccaggatggtctcaatccaacttttgactattgtgaatagtgctgctataaatgtggatatacaaatatctttttgagatcctgcttctaatttttggggacatatacccagaagtggagttgctgaatcatatggtaattttacatttcactttttgaggaacagccatactgtttttttacagcagctgcatcgttttatatggtttgtgatttttccatattcttgccaacactggttttttttttttttaatagtagccactctaatgggtttgagagtggtatctcattggagttttgatttgtatttccctaattattagtgacaatggacatctttacatgtgccttttggtcatttgtatatcttctatggagaaatgtctattcaatcctttgcccattttttaatcaggtttttttttcagtgttatgacataatttgtattttttctacctccctttagtcccttagactgtaaggtccatggttaaaaacctgtttaaaaaaactgggcatctccaccttcaagaccttgctttgcacatattatgcactcagtaaatgtttgaatgaatgaacaagcttaagataattttctagtcatcaataagaatttctatttaaaagtcatgctgatgagatagtggctacagtagccatgaggggctgagtacaagttgatgttactaagaagtagaaaatgagtaagccaaaacagcgcatcggtggacaggagagcagagtgctcctgcagaaaggctcctagaacccttggatgtgtgcacataccttatgaacacacccacagtgtctgtacttgaggcttcctttttttctgatgattttctggttcaaaggtatctctaaccttgaaaaaagcctcctttttctggaggtaactcagaaatgagcctctgttttccccttatatcagatgttttctggagtccaagagatgaactttaactctacatacacattgagacttctggtttacctagaccaaagagtggtttgtgacgccaaactgagaagggttttatgggtgttttcctgacttgccttggtttaaccttctaagaatgattctttcttaactaattttgaacttcatcttttagtataatgactgtaatttattcagtatctactgagcagaggtgcactttctatgtactgtttttgttcattattcaaaaggacactccatatttctgactagtgtctactgaggaagattctactccttccttgccttctcctccctctcatgctttagttgggttaaaaccattcctattcttattaaaatcgtatttggtggtggggagggggataaaagcagcgtcctagcgcaataaagtagatatacagtagagctttggtggagctcccaggttgagtttttaagtctcagggctccaataacaatgcagatgggacagggacacagaaaatggcccaacaattagaagcatttggcctggcttctctttatttcatctctcatataagtgtgaggggatccacacctggcccctatcagtttcatcagaccagtaagtatggccaggttcggactccaaatgctgtaaacaattaggatttatctctgtgttttgagtttgtcatatgctgccaaaataacttctaagctccataatatagatgagatcagtggtctttgaacaaggtggagtgatggtgtgcaccccagggggacactagatgatatattaaaatgctggaaaaaaagttgtggtttcctattttttcagttaaaaaagtactgagagattagctttattgataatacgtaaggattgccactggcatcctcaattttttttcctggcacactgaccagaaattggtctgagaggaatgggtaggaggagggaggcatggcgtttcaagtgagaaaggttgttactgagactctcactctttgatttgcttttagccaattgtgaaatattgccattcatgtgtattggttaaatggacttgtggactagagttagttttcattaaaatgactctcacagatgctgacttaatagaattcctgttaaaaaaataagtgaattgaggataacaacattgtaagcagaagctgcaataatttgccttgctcaatgtgtgtgctagttccagctcttctcagctacttgatagttaaaacagtgatctgatctgacagacacagcaaatttcaaaattattcacaagattattataattaaccataaactttgtcctaaatgtatatggtatcttgaaatattagctgtggtaacatgaaattgtaggaattaatgagattttaaaaactaagaatcttgagtaagagaataaaaatctacaactttaccagcaatttattttttaaagaatgtagtaatctaatcatttactctaaaatttcacaaaatctactgcaaattcgtgaatgataaatgtctttgatatttgttagtaaaggacaaaaagtgctgagttacttggagagcatttggttttcctgctgcaataatatagagaacgcagtgtagcaataattaagttgaatatgggtggaagacctatacaaaaccttgccaggatttatatgtgtgtgtgtgtatttaaaaaattttttatttctataggttattagtgaacaggtggtatttggttacatgagtcagttctttagcggtggttcgtgagattttggtgcacccatcacccgagcagtatacactgaacccgatttgtagccttttatcccttcccaccctttcccccaagtccccaaagtccatcgtgtcattcttatgcctttgcatcctcatagcttagctctcacttatgagtgagcacatacgatgtttggttttccattcctgagttacttcacttggaataatagtctccaatctcatccaggtcactgtgggaatgtaaactagtacaaccactatggaaaacagtgtggagtgtccttaaagaactaaaagtagaactaccatttgatcccaggaatacccagtactgggtatactacccagaggaaaagaagtcattgtacaaaaaannnnnnnnnnnnnnnnnnnnnnnnnnnnnnnnnnnnnnnnnnnnnnnnnntaattaaacaaattgtgaaacataagagatttactacatatttggataaaagtgtagtttctaacgtgtttcaacgtatggaataaaccaaaggttattgttattgagaggccatcaaaagaaagatgtactggcaaagatgtgtttgctcagagcaaagcattaattctttaacacaaaaggttttatgaaataagtatgtacagtcactgatggaatggctactgtggaatgaaaatggaatcagataaaattcattaatgatgcctgcggcagagactacattttccagcctctctgtggatgggtgtggccataagattaaattctcactggtggaatgtgagcagaagtgaggtgcgaccttgtgcattacccattgagaaggaaatctcttgccctggttcctcagcccttcccattttgctggctggaaatggtatgaggctggagctactttgggggctatttattggcaacatcagagttgctcccctcgattgggcccctggatgactttgggaaacagaatctgcagattccctctggaatgtttttttgagaaaaggttatatattttgaactgttgcataggtggtagtctctttgtttatcctcaccctactaatcgtacagaacctgatattaaaagtagggtcaatacatggtgctccagcatgacacagtgcagggctgtcctcagagagagaggaggagggtctgatgctgctggccaaggagagctaacaggatttgaaggtcaagggatttggattcattcaaaccaatacatgtgtcctcattcaggttcttaaggtcccactctttcccatcagcgccctaactttcatgaaagagacctggttagtctaggactacaacattcattgaattctacaacccacagaattaactttttaggctgcatatgtcgggctgctatgagagaagaggttctcttagtctgtcatagagactctcttgtcttctgactttgtcttgacctctgattttgcaattttcattctttaagcttcccagtgcagtgagaaagtggctgacctatccttaatcttgtattatttctgctctaatggtatatttcagtagctgcttgatctgccacagacttggctttaataggcagttgttacaaattgatcacaggtaatgattttaaatcagctctattgagatacagtttacatacctacaattaaatgtaccaattttaagtgtacatggtgatatattttgacaaatgtatataagcatgtaatcaccaccccatttaaaatattgaacatttacatgatctcaaaaagttccagccctccatatccccaggcaagcacgcggaccttctttctaacacaatggattaattgtgcttgcttagaatttcatatgaagactgtctttttgtctggcttctttcattcaacacaattattttgatattcatccatgttgctgtgtgtatcatctgttcattccttttttcgctgggtatttcattttatggatattccacaatttgtttattcgttcacctgttacaggacattttcattattttcagtttgaggttattatgaataaagctgctgtaagggttttgttctgtgcaagttttggtgaacatctgtttttgtttttcctgggtaaatagctaggagtaaaattcttagattagagggaagatatatgtttagctttataagaaattgccaaacaatttccattttacactcctgctagtattacctgcgagttttcatttttgcgtatcttcaccagtgtttggtactgtcagtcgttttaattttagccattctagtgggtgtgtattattgataatatctcattgtgactttaagttatatttccctgatgactaatcatgttgattttcttgtgcttattggtcatttaaaaatcttcctttgttgaagtctctgtcaaacttttgcccatttaaaaaaacatgttatatgctttttaaaattactgaattctaagagttttctgaatatataatttggatataaaccctgtttcatagatgtctgttgcaaattttttttttaccaatctttgtcttgcctatccattttcttaccagtgttagggaaaatagaccctaggctggcctccaataattcctgcctcctggtgtctacacctttgcctaattccctccccttgagtgtgtgtggaacctgtgacttgattttaaccagtagaatatggcaaaggtaatggaatgtcactcccttgcatgatataagagtccatcttagcagattggagtgagagacttttctccattgatggctttaataagtaactggctatgttgtgagaaggcctatggagagggccatgtggcaagaaattgcagacagcctctagtagctgagagtggccaagcctacagccagcaagaaaatggagacctcagtccgacaatcaccaagagatgaatcctgccaacaacctgaggaaggctggaaacaggtacttctccagtcaggccttgaggtgagactccagcttagccaacaccttgattacagcctcatgaggtcctaagcagcagatttagctaagctgtgcatggatttcttatgagaaattgagatgataaatatgtgtggtattctacgttgctaaatttctgttaatatgtttcataactatagaaaagcagtataaacaccttttgaagagccagaagttttttgtttttttttttaattttgttgaagtcaaaatttctttctcattttcttcttcttttgctgtgattagagctttggtgctctctaagagatatgtacttactctaggactgggaagagtgcctcttgtgtttacttccaggagttttgtagttttagcttgtaagtttaagtctgtgatccattattgtgcatggtatgaggtaaggattgaggtccagtttatatcccgtatagttatctagtgtttacagcatcatttgtgaaaaatactactacttcatcattgaaatacctgtgcttttgttggaaacctattgagcatatatgtgactcttcctcgaccctctaatttattgcatttgtgtatgtatccctctttgtgcccaattccacattgtcttcaatatgataactttataacaagtcttgagatcctccaactttattttttttaaagactgttttggtcgtttcaggacctttgcatttctgtatacattttagaatcaggctgtagattcctccagaaagcctattgggatttttatggagattttccgaaaatttatgtgtggatttaatgcaatttgacactttaatgggattgatatttgcattctatgaacgtgggatatctctcatttacttaggtctttaaaattactctcagcagtattttgtagttttcagtgtacaggacttgtgcacgtcaaatttgctttttctgattataatggctccttttgattcttccatttctcttcattgtatttatgcattccttttaatcctttaatattgttatgatagctcatttaaattcctcctctgctaattccacttctttgtcatttatgggtctgtttctatttgcttacttcttttgtttgttataggtcacatttttctgttattttgcatgtctagtaattttttttattgtatgatggttattttgtgattgagtgtctagattctgttgttttcttttaaagaatattgtgttttggcaggcagttacttgtgagtttatagtttactctagaactactgcagctttcctaccaagttataacctgttggtgctgctgcctaagaccccaagtgttccctatggtttttccactgtcagtgctggaacttaagtatcttccaatcatgcatgagccctgggaatttttttttttatcttacagcactgatagttgttcttttttcatatatatgagaaaaaatatatgtatctattttagggttttctttccccaaatttcatgtcatgtccctgtacatgtgcataaattagcatttgcttaaagagccaaggggacccttacagatgcttgagctctttctctgtgcagttccttctctcccatatgctgctttgcagctcctagccacccagcattctctaacattctttgtctcctcatagcagtgagaacatcatcctctgggttcctcttccctgaatcacaatttgggaagtacctctggttagaaagcttcagctgtcatcggctcacctcatgaacttctcttcttctgaggattgtcttcctgtgttgcctgttatccagtgtctgaaaacagtgtgtttcatacactttcccagttttctggctgtttataaatcttgtatactagttactttaccacgcctagaggcaaaatgtaagtaatcactctgcctctgtctttgataaatattaatttccagtttaaagacctgtatcacttgggtttttcttttgtaataatttattgcccctagtgtgtggccagttatctctgattttgagaattccagggaaacttagctggatcaggagaaaagaagaccagaatagtgcatctgtttcacctctgggttccagggacgaggcaggatgatgactgcaatggcaaggaaagccattgaatgatcacttcagtagctattttggtcctacttgccatggacagctaatatcttttttccactgatgattaggtcatcagtgccttcaaacccaagcaaaagaaataattaatgccagtttttcacctttggaatatttcttagaaccacttctgataccaactataggaacagtcagagttccatgcaggaaatggtgaccgtcaagttctgctcaggagataaaaaccacatctggtctctgaacagagtggtttcaatgttaagaattgttaattaagttatggagtttgctaactaggtaactaagagtacagtaagaaaactctagggcagggattggcaaagtacaaccctcaggagaaatctgacccaacatctcttcctgcaaataaagtttcattgaacacagacatccccaaggctaggttaaagaagtgattgtcaagggaattgcgagcagacaagaagcaaacaagaaggagcacatttctttctttgtctccagctttggagtctctcattctctctctgcccctctcctgctggcagggcctagagccacctgtgagtgaggagtgtggttggtagttcctactccagtagcataggctgaacacagaagggagcctggacagtgagagatgttaacagctggcacagaaatgaatttcaagtgtaaagatttaaaataggaaattaggtgcttgtgaaattattgggaaagtggaaggagcggaaggagcagaagccagcgagccctagagaggcttcaggtccatgccctgcagctttgttcccggagtcagagcactattgctgctacccaggagacctcagggagccactgccaacgtcctggcatccttacacccatgaagccaggtcgagatggtagaatgtggtctcttcatgctctctctcctctctgtcttcccaatcttaagcaaatgcatcttgttgatagaattcatgcagcatcttggtaagaaaggagtctaagaaatatggctttaagccttccagtctctgaaatacagggaagaacatggaagaagacagaaataaataccgaagccagcagataatatctagcaccagctcacctgtaggcaggaagtaggcatcaggaggacacgggatactacaagatcgcacggatgtggtctattccataaaagtcagacctttaacattcagtcgattcttcatggtactttgcagtgacaggtagagtgaccatgaacatctcgtggaccacacagaagttgactattttgtttctgttgttattctcatgacaaagaacagttgtccaggttaaagatgatgaaggatggcataagggtcaagacaacatctggggcgctaacagggtgaaactcctgctttctgtacttagaaaagtctttgccctatggtaaattctcatagtaagtcgtagttaactattttcaacttttcttttagaaaagtccagttttccaatttgatcttttctctgatgacaggtggttcgtggtaagcgatctacacatgtataatatgcataggcataatgtcatcatttgttgctttaagatgaatacgatgttttcatgtgggatatgatgaaggcttttttgggtttagagagaccactttgaaaagatatgtttagaaataattaaattgtttgttttgttttgttttgttgtttgtgttgttttttgagacggagtctcgttctgtcacccatgctggcgccatctcagctcactacaacctctgcctcctgggttcacgtgattctcctgcctcagcctctcaagtaggtgggactacaggcgcgctacaggcatgcaccaccaggcccggctaatttttgtttttagtagagacagggtttcaccatgttggccagttgctgtcgaactgaactcaagtgatccacccaccttggcctcccaaagtgctaggattacaggcgtgagccactgcgcccggccagaaatgcttgtattgttaacgtgattttttattacacaaaatgtgggtcacatattttaaacagaatactaagcagcctctccagtaacaaaagctcatggtccgttgagtgctttttcatgagtgcctagcactttatataaattatctctcttaaccctcttagcaactctgtaaggtcatgaaatattcttttttcaaggttattgctaaaatttttgatagaaactttctatttttttttcctaccatctgctaaaaaattcctgatactcttgcctacttggtaagattactttgtaattaaacttgcttatcaacattttttgtgtgtgtgaaggtagtaagattgtggtatactagaaatgttgcttgaacaatttttttctaatttgtttttaggcatgtccaattaataattcttttaatcctttgaaggcacttgcattttaaggtcagagagacaattataaaacattttttcttagggttctgtagtaagtgttattgaggaatgtcagcaggatgaggaaacagggctggcggggaggggagaagctgctgtgttgtgtaggtggtaaaggaaatgctctctaatgagatgactttggagccgacttgctgggagggaaccatggggctgtctggacaggagatggcacctcccactttgcctggagcagtctcaatttgcacctgttttcctggcatagatttaagactcccctttttactcccaaagtgccttggtttggagggtaaaattgtatgatcaccctgtatctggaggaattgtgcttcaggcagatggtccagcaaatgcagaggcaaaggccgatgctccccactgcatttgagcagtgtgtggctggaggggagagtgaagagggagccagagagacagcatgaactcatcctgtagcagtgtagagcattgttaggagattctgagtgaaatgggtgtcattggaatctgagaagagtgacatgatctgatttaccttttaaaaggatatctgggccaggcacagtggcttatgcctgtaatcccagcactttgggaggcagaggcgggcagatcatgaggtcaggagttcaagaccagcctggccaatatggtgaaatcctgtctcaactaaaaatacaaaaaaattagccaggcatgggggggtgtgcctgtagtcccaactacttgggaggctgaggcaaaagaattgcttgaacatgggaggtgaaggttgccgtgagccgagatcgtgccactgcactccagcctgggcaacagagtgagactccatctctaaataaataaataagtaaaagggtatctgttcttctttgtgtctctgtgtatttgactcctctaggtccctcatgtaatagtcttattgctctttgacttggtaatgaatactctaccattaaaaggagtcttggctaggcacggtggctcacgcctgtaatcccagcagtttgggaggccagagtggttgggtcgcttgagcccaggagttcaagagcagcttgggcaacatggtgaaaccctgtatctacaaaaaatacaaaaaaaatttagccagtgtggtggtgcttgcctgtagtctcagctacttgggaggctgaggtgggaggatggctttagcccaggtggcagaggctgcagtgagtcgagcctgggtgacagaatgagactctgtctcaaaaaaaaaaaaaaaaaattttaaaaagagtatctggctgctggagtgagcagagactaaagctgaagggaggcaaaggcatggaggcaggagcccacctagtagctggggatgctgatccaggcagaagatgatgggggtgttggagtggaggttgtggtattggtgatgggaggtggtgagattctgggcatatagtattttgatagtaaagctgacagggtttgctgatgtattggatgtgggatagaagaaggataagacccgaggggtttggatctgagcaattggaaggatcaggttgccatttctgagaagaggaagaccataggaggagcaggtaaggtgggggaataaggaatcttttttgggcattttaaggttgagataactcttagatatccttagggcagttgaatatgtgtgtttgggaaatcaggggaaaggtctattatggagaaaaatactgagtaatagtctgtgtagtgttttcaattctgtgaggctgaatcaggtcaccaggattgataagagatagcaaatctcaagaattcagctcttgtgggtggtggggtggggggtacttcattgtttaaaagtttgagagaggagaggcagcaaaggagatcaagaaaatatggccattgaggtaagtagagaagcaagagagtttgagaaaatatggacattgaggtaagtagagaagcaagagggtttggcattttggaaaccaactggaacaaagtctttcaagaagaagggaaggaactgctgtattaaatgctgctaatgggttcagtgaaatgaggtctgagaaataattattggatttagcagcgtggaggtcatgggtgacttgtcaggagctgtctggggcattatggagatgaatgcttgattggagtgagtgcaaggaattgggtggagaacaactggagaaaacaaaagaagtttacagtgagttttgctgaaacttcttgtaggtcttaggttagcatggtaatggatttccctatcatggtgagcaaattaatgggtaactttatttttccaaaatgtgtagtaaactatgatttttaaagtaattcaaccaataaaatgaatattctttcttttaacatttcctctgtttaattgaaagtggtagatatttgttattaatggtcttgaaataattatttgaatcagtcagaactttaaacttaatgtaccaagctctttataatctaagaatcttatttttgtttatgcttttcacaaaacaaaggtgggtagtattagtattcctgtattctactgtagctacataacaaatcattcccatccaatgggtttgtttttgatagatagtccatgtttgtgaaatctagcttttggaaggggtggaactcaaaagtccttgtccgtcttttgtgctaatggtactcttgaaagccccaactcacagagagagacaggcatgcatcatctgtcagggagcctgacaactcttgacttaccactgttggctttctaagtgaagaaaatcagtaattacatggtgcatcataaaggtatatcatgaaaaatgttgaatgtcaacagcgatgatggttcttaagctgagataacaacctactttgttgtgacaatggagtctcagggtattgtaagagaaaaattattatatgaaaggctaacatctgtcaagttccttcgtcagtgaactttattctgtggtcaaatttctaagcatagttcttcctatataaggtaacttatgtagacctggacatgttttatttggaatgacttccatgatgtgtctaagacagaacctttgatgtagttcacttgattaatgggattatagccatcaagctttgttctgaggataattnnnnnnnnnnnnnnnnnnnnnnnnnnnnnnnnnnnnnnnnnnnnnnnnnnnnnnnnnnnnnnnntaaacctcatttgcccacatttaaaattacccaattcatttaatgctgaaaaatatatattaatgaggaaaaagaaaaatgaaaaatgttctctgggtagacttccattacccagagaactggaataagtagaagtatatagtttatagtaaatttttggctcttttaattcactaataatacaataaccttgtgtgtatgtagtgtatatacatatatgcctgtgtgtatattggtagccattttttaaaaaatgcaactactcacaatagatattcatgttaacctagttttttctctcgtagctgagattgtatctctagatcaactaatatgtagctgcagctcggttttagagaactatgtagataacattttgtatatttctgtgatttatttaaaccttctcttacttttggacattgaggttgtttctaacctttaatgtctaggaaaagatctcattttgttttctactgtttattttgttagaataaattcctagaaggctcctaggtcaagagaaatatgccttcttgagtggaggtaatctatattcacacacacttaacacacatatgtacatataaatccatatactccttcttgccctccaagtaaattctgccagtttaattgtaatttatttactagggaatgaaaagagcttaccacagttctgcacgggtaatataaatgttggaaatgtgggtattttctcagtgttgtttgtggaattaaaatcctctgaaatgaggttgcatttaatatgttctaaatttgaggctatcatagcaaaaatgatatcttaatagatggctgcatagctcataacctgaaacactgatgaactttccatttacatagctgtctcctgcctttcctatttgatgtgccataggaggtgaaccatgaaaggtagtagctgttgctgacactgcttctgtttgaatgattattttcttttaaattttccaatcttaattgtacgatttaagaacatgttgaagaagaatgattcattggcaggtaaaaactaaagcctactctataagttggaacatggttattatttcttagagattagctctctactctgctttcaatagggaagttcttgacttattaaattgccagtctccttcatccagctgaatggtctagttcttctacttaaatttaaattataagcctactggaaagtatttttgtccaactgagcatattcatttcgttattcaggtacttttgccccttattaccaggaaattaaatgtaaaaatagtgtgaaacaaaatgattggtatacttaaacacccccagacacccatccacccacacattttctatagagggttaatgagaagtgaaaatgtttttctgtgctatccattgtaatagttgctagtcacatgtggttattaatcacttgaaacataactagtttggttgaggaactatcaattttaagtaatttaaattttaatagccacatgtgactagtggctactgtacaaggcagcagagtgtagataattttcaagggtccccgacccccagggcacgaaacagtactggtccatggcctgttaggaactgggccacacagcaggaggtgagtggcaggcgagctcccatttaccacgtgagctccacctcctgtcagatcagcagtggcattagattctcacaggaatgggaaccctattgtaaactgggcatgtgagggatctaggttacatgctccttatgaaaatttaactaatgcccgatgatctgaggtggaacagtttcatcttgaaaccatcccccacaacctgtgttaaaattatcttccacaaaacgggtccctggtgccaaaacagttggggactgctgccctaggacaagggctggccagctctggcgagtgcgacaaatccagctcaccacttgtttttataaataaagttttattgaaacacagccatgcacactgatgtactgtcaatgatcacttcaatgctacaaaggcagagttgagtacagatgcccctcgactcatattgggtttacttctggataaacccattgtaagttataagttgaaaataacgtttagtactctgataaaccgattgttaagtcaaaaaatcgtaagttaaaccatcaaagtcagtgaccatctgtagttgcaacacaaaccgcatggcccacaaattgtaacatatttactatctggttctttaccaaaagtttagtgaccccctgccctgtgtaatcagatggaaactgactcaattccagttccattgccagctgtagctatatttctgaaacagtgtttttaaaaatgttaacaagcatttttgggagaattggatctatggctaatttgagaagatgcagagttgtaaataatgaagtagattcatctactacactttttacacaatctttaatccccttatttcactataaatcatgcagaggtttattatatagaatattttgttaaccaaatttatttgaccagtgattttcttttttggtaactcttgttataagggacacagacttagaaatgctgctttttaaaaatagtgagttttcctcttaatagatgatagtaaaataagaagcatgtgaaagagaatcctcagagtaggacaaaggagaaacggattgaattagtctattttgtgttgctataaagggaatacctgtgcttgggtaatttataagccaaagaggcttatttggcttatggttctgggactatacaagaagcatggcaccagcatcaacttggcttttggtgaaggcttttgtgctgtgtaaaaacctgtagataaggtcaaagagggaacaggtatgccaagagggcctgaaccccacaatggggagcaaatctccacatgagatttggggtgacaaagcatatccaaaccatagcgtgcatatttaatttctgggtttcattaaagcaacagatatttgagtacttttaataggtctggcagtttgcccaggttgtagacataggattacatgacagtatgttctctactctcaagtttctgtttgtgctgttataaatttgagcagtcatcattaaatctcagctatacatttaagttctgttgtgacagttgccacaaaggaaacgtctaaggtgctaagtatatatggttaggaaaaatcttgcaaactttttctgtaaaggactagatagtaaatattttaggctttgtgtgccatatgctgtaggtgtcacctattcaattctcctgttgtaattagaaagcagctgcagatgacacataaacacacatcacacagacaaatatgtcagtgtgattatgccatacatacatctatatctatctgcatttgcatacttctcaagcacttttcaaaaatgaccatacaaatcataaagtgttaacagaattttggagaactgattttcatgcagctcatgttctgtgagtgctatgcccttgcccaagaccttcaaaaaggtcatcatacaaatcttatattcttggaaaattaaaaacctatacttgcaaatccagtgtcaaagaggaaatcacattggaaattagaaaatacttagaattgaatgattaaaaaatacttttgcatcaaattcatgggatatgaatatcccaaagagggaaatttttgtagccttaccgattagattacaaaataaaaaagacttaaaatgaacaagctatacatacaatttaaaatgttaataaaagagcaagagaagatcaacaaaaccaatagtaagattcttcaaaaaaactaatgagataggcaacaagcaagttgatgaaggaaaaaaagcaaaaagataaaaataaacaattttaggaatgagaaaagagaagtcacaggtagagcagtgagtagaataacataagagtacaatgaagaactaatttgaagcctagatggaatggccaattacctaggaaaaatccattgcattcaaaatcaggcttgaataaatagaaaatgtgaatagatttgcaactattaaaggagtggcctcattacgtacaatttctacttaaagagagaacaccaaatacccatgtgnnnnnnnnnnnnnnnnnnnnnnnnnnnnnnnnnnnnnnnnnnnnnnnnnnnnnnnnnnnnnnnnnnnnnnnnnnnnnnnnnnnnnnnnnnnnnnnnnnnnnnnnnnnnnnnnnnnnnnnnnnnnnnnnnnnnnnnnnnnnnnnnnnnnnnnnnnnnnnnnnnnnnnnnnnnnnnnnnnnnnnnnnnnnnnnnnnnnnnnnnnnnnnnnnnnnnnnnnnnnnnnnnnnnnnnnnnnnnnnnnnnnnnnnnnnnnnnnnnnnnnnnnnnnnnnnnnnnnnnnnnnnnnnnnnnnnnnnnnnnnnnnnnnnnnnnnnnnnnnnnnnnnnnnnnnnnnnnnnnnnnnnnnnnnnnnnnnnnnnnnnnnnnnnnnnnnnnnnnnnnnnnnnnnnnnnnnnnnnnnnnnnnnnnnnnnnnnnnnnnnnnnnnnnnnnnnnnnnnnnnnnnnnnnnnnnnnnnnnnnnnnnnnnnnnnnnnnnnnnnnnnnnnnnnnnnnnnnnnnnnnnnnnnnnnnnnnnnnnnnnnnnnnnnnnnnnnnnnnnnnnnnnnnnnnnnnnnnnnnnnnnnnnnnnnnnnnnnnnnnnnnnnnnnnnnnnnnnnnnnnnnnnnnnnnnnnnnnnnnnnnnnnnnnnnnnnnnnnnnnnnnnnnnnnnnnnnnnnnnnnnnnnnnnnnnnnnnnnnnnnnnnnnnnnnnnnnnnnnnnnnnnnnnnnnnnnnnnnnnnnnnnnnnnnnnnnnnnnnnnnnnnnnnnnnnnnnnnnnnnnnnnnnnnnnnnnnnnnnnnnnnnnnnnnnnnnnnnnnnnnnnnnnnnnnnnnnnnnnnnnnnnnnnnnnnnnnnnnnnnnnnnnnnnnnnnnnnnnnnnnnnnnnnnnaattgcattgaatttgtagattgcctttggcagggtggtcatttcccattcgtgggatgtatttcccatttgtttgtgttgtttacgatttctttcagcagtgttttgtatttgggatgtatttccatttgtttgtgttgtttataatttcttttagcagtgtttatatttttccttgtagaggtctctcacttccttggttaggtatattcctttttttttttttttttgcagctattgtagaaggggttgagttcttgatttgattctcaccttagtcgctgttggtgtatagaagaactactgatttctgtacattaattttgtatcctgaaactttgctgaaatcatttgtcagttctaggggctttttggatgagtcttaagggttttctaggtatatgatcatatcatcagcaaacagtgacagtttgacttcctctttactgatttggatgccctttatttctttctcttttctgattgctctggctaggacttccagtactatgttgaatagaagtggtgaaagtgggcattcttgtcttgttccagttctcagggggaatgctttcaacttttctccatttggtataatatttttgactgtgggtttgtcatagatgactttacattgaggtatgtcccttgtatgccgattttgctgagggttttaatcataaagggatggtggattttgtcaaagactttttctgcatctatttagatgatcatgtgatttttgtttttaattctgtttatgtggtgtatcacatttattaacttccatatgtaaaatcatccctgcgttcctggtatgaaacccacttgatcaaggtgtgttaactttttgatacgctgttggatttggttagctagcattttgttaaggatgtttgcatctatgttcatcagggatattgttctgtagttttctctttttgttatgtcctttcctcattttggtattagggtgacactggctttatagaatgatttagggaggattctctatcttgtggaattgtgtcaataggattggtaccaatgctttgaatgtctaatagaattcagctgtgaatatatctggtcctgggcttattttttgttggcaatttttaaaattaccattttaatgtcactgcttgttattggtcttttcacggtttctatttattcctggtttaatctaggagggttgtatttttccagtaatttatctatctcctctaagttttccagtttatacatgtaaaggtgttcatagtagccttgaatgatcttttgtatttctgtggtatcagttgtaataactcccgtttcatttctaattgaacttagttggaaattctctcttcttttcttggttagtcttgagaatggtctatcaattttatttatcttttcaaagaaccagcttttcatttcatttatcttttgtatttttttgtttcaattttatttagttatgctctgatcttggttatttctttttttctgctgggtttgggtttggtttgttcttgtttctctggttccttgggttgtgagcttagatggtctatttgtgctctttcagacgttttgatgtaggcatttaatgctatgaactttcctcttagcactgcctttgtcgtatcccagaggttttgataggttgtaccactgttattattcagttcaaataatttttaaatttttctcttgatttcattgttgacccaatgatcatccagtagcaggcttatttaatttccttatatttgtttggttttgagggttccttttgaagttgacttcccattttattccagtgtggcctgagagagtacttgatatagtttcagttttcttaaatttactgatacttgttttgtggcctatcatatggtctagcttggagaatgttccaagtgctgatgaatagaatttatatcctgcagttgttgggtagaatgttttgtaaataagtgttaagtccatttgttctggggtatagtttaagtacattgtttctttgttgaattttctgtcttgatgatctgtctaatgctgtcagtggagtattgaagtcgccactattattgtgttgccatctatctcatttcttaggtctagtagtaattgttttataaatttgggagctccagtgttaggtgcatatatatttaggattgtgatattttcctgttggacaatcccttttatcattatataatgttcctctttgtctttttacactgcaattgctttaaagtttgtttggtctgatgtaagaatagctacttctgcatgcttttggtgtctgtttttttctacccctttaccttaagttcatgtgagtccttgcatgttaggggagtctcttaaagacagcagatacttggttggtgaattcttatccattctgccattctgtatattttaggtggagcatatatgccatttacattcaacgttagcattgagatgtaaggtactattctattcatcatgctatttgttacctgaataccttattttattgtgttactgtttgataggtcctatgagattcaggctttaaggaggttctattttgttgtattttgaggatttgttttaagatttagagcttcttttagaagttcttggctgggcatggtggctcactcctgtaatcccagcactttggaagaccaaggcaggcggggtcaagagatcaagaccatcctggccaacatggtgaaacctcgtctctactaaaaatacaaaaattagcttggtgtggtggtgtgcacctgtagtcccagctacttgggaggctgaggcaggagaattgcttgaagctgggaggtggaggttgccatgagccaagattgtgccactgcactccagcctggagacagagcaagactccatctcaaaaaaacaaaacaaaaaaacaaacaaacacaaaaaaagaagttcttgtagtgctggattggtagtggcaaattctctcagcatttttttgtctgaaaaagactatctttccttcatttatgaagcttagtttctctggatacaaaattattgactgataattgtcttgtttaaggagctaaagataggaccccaatctcttttagagattgaagttcttttgtctacttgttcaattctgttgctgagagattccagtgtgttttgtatttctttaagtgtgtctttcatttccagaggttgtgattgtagagtttctgctgagaaatctgctgttaatctgatagggtttccttcataggttacctgatgcttttgcctcacagctcttaagattcttttctttgtcttgactttagataacctgatgactgtgtacctaggcgatgatctttttgcagtgaatttcccaggtattctttgagcttcctgtagtctagatctctagcaaagccggagaagttttcctcaattattccctcaaatacgttttctaaagtttcagatttttcttcttctttgggtacaccgattattcttaggtttggtcgtttaacataatacaaaacttcttggaggctttgttcatttttttgtattgttggattgtgttaatttgaaagctttgtcttcaagctctgaagttcttttgtctacttgttcaattttgttgctgagatgttccagtatattttgtatttctttaagtgtgtccttcatttttagaggttgtgattttttttatttatgttgtctatttctctggggatttttctgtccatatcctgtaacattttcaaaatttctttaagttggtattcacctttctctggtgcctccttgagtagctaaataagcaaccttctgaaggttgagagatttttttcttggtttggatccattgctatgagctagtgtgatcttttggaggtgttaaaggacatcgttttgtcatattacctgaactatttttctggttccttctcatgtgggcacattatgtcagagggaagatctggggctcaagggctactgttcagattcttttgtcccatggggtgttctcttgatgtggtgctctccgccttttcctaggcatggggcttcctgagacctgaactgcagttattgttatttctcttctggatctagccacccagcagagctgcctggctccaggctgccactggggaatgtctacaaagagtcctgtgatgtggactgtctacaggtctctcagccatggataccagcacctgctttgttggaggtagcaagggagtgaagtggactctgtgagggtacttggttgtatttttgtttagtgcacttgttggcctccagccaggaggtggcactttcaagagaccatcggctttggtagtatagggggatacaagcttgccctagggtcacctggataagtatgggggtttctcaggcagtgggcagggccatagagctccgaagagattatgtcctttgtcttcggctaccagggtgggtagagaaagaccatcaggtgagggcaaggttaggtgtgtctgagctcagactgtccttgggcagggcttgcttcggctgctgtggtggatggagatgtggtttccaggccagtggagttatcttcccagggggattatggctgcctctgctatgtcatgcaggtcaccagggaagttggggaatgctggcagttacaggcttcacctagctcagctaccatgaagcccgaaaggctggtctcattcctaccgtatgtcccccaaatggcactaagtttatttccaggcagtgggtgagcagggctgagaacttgccccaggctaccagcctctcgctgagagggttttcaggtttcacacttccccatctgccatggcttctgtgctcctgtctgcactcctgattcaacccttcttccgggttctgtccaggaaacttcgggttcacttgaaattattacaaattcagctggaggtcttttccctgtggtctttccctgattccactggtagccctccccaaggattcctgagacaaaaccagaaatgtgtactctggggactgagagatcccacaggactcttcccaattcttcttgtacctgtgtttttcgctcagctctctaaatttgcctcagctccaggtaaggtcaaatcctcttctcataatctggaccttcaggttcccctgtggttcaggggcagacagttcccctttcacattttcacactttgggcactcacagttttttagctgtctcctgaagctcgcagcagtaatccactctcttccaagggtctgtggattctctcgactctcctggtatgttcctgtggtagttcttggagcaaaagttcacaatatgagtctccacatgctgctttgtttgtccaagtgggaactgcaagttagtcctgcctcctgtctgtgattttctcctataccccagttattttattagatgcagaccaaaaaacccccaaataattaacattcatttatcattgaccacccccaacaacacactttcaatgctggaattgaactttctgaaactgataaggtacatctaccaaacccatgccacccaacaatcttccagtccttcttcctagatgcataaatacgaatcttttccttatttctatcctttagtgaccacttaattttcttttctttctttctttcttttttttttttttttttttttgagacagagtgttgctgttgtcacccagtctggagtgcagtggcaccatctcggctcactgcaacctccgcctcctgggttcaagtgattctcctgcctcagcctcccaagtaactgggattacaggcacccgccaccatgcacagataattttgttatttttagtagaaatggggtttcaccatgttggccaggctagtctcgaactcctgacctcaggcaatccacccgcctcagcctcccaaagtgctgggattataggcgtgaaccatgaccacttaattttcaagagtagtatgtggtactgcttagctcatcagattctccaagtccctaataatttcctatttgggagctggagaggagatgatacttctaggatgcttcaatttcagcaacattcattttctttttctgagtcatgagcaccagggttcaccctaaaatattagccagatctcataggctgaattaggtcacagggtacaaagtgttgtgcagactggtgcatgtggctcccattgaatataataacagccctttgacacgtgtggcagctgctgccagagcctccagccaggatctgggctagagggtggtacatgtataatttaagtaataacataaagattaaatatgtaattggaaatgatttcatagaataaaactgaagcctggtttatcttgaaaagaaattattgcagacatgtaaatagcttactgtaaagtttaattacagttttagtagcagacaagactcaattgataaatctccacaaggagagtcaagtaggactgaaaatctcactgcacttgcatgaaaacaacaaaagctaacatgccaaaccgaatgcaagctttgttcatttcctcaaagttaattgttttgactataatcatacagttattatttaatggccatacacaatttatttatcattttctaagagattaatttgaaggtctttttcttgttatttatgtggaatttacaggaaagtcagatattagattgtagttttagggggtgattatttttataactcaattgatttaaatgttaggttttgtcatttcgttgaatccatcagttatcatcagtattcattatttcagttccctctgagaaatgagaggatagttttgtgagtagaaaatgatttgaagagtttggcagaataaaactgaaaactgattcatctgacaaaactcttttaagttcggtacagaaacaaggactagatagttgtctcactaactccattcttggtgttcccttgactttgctgtttattgtgtttttttgttagaatttcttgaatttattaatttttgttacagttccatcatgaaacttactgaattatgtagatttaaattgttttccatggtatttctttattaatgtagaatttgaaaaattcacgcagttctggggagactattttaacttataccctctcctccttcctttttcatctgagcttcctctcatcaatcttaatatttacacctaaaatcttatgagttgagacaatatagaaattaattattgatctgtaaattatgtgaaagttcccaacatagaagcattttatatatattaaatcagtgttagaattcgtggctaggtacccgtagtgtaaaattgtatttaggagctgaaagaccgtgagtgtgaatggatgtttaggtggcaattggaaagatttcccagtattctgaagaacataagctatttgacctatttgacataagtcttatgcttccttttacttagatttctggtttgctttcttttggtacatgttatacctgatactgttctacagcggtcttcagtaattttttaaatcttgaaatagaatggaaagattgagagtgacctgctgaggtaactggaccagaacaggttaggagcgcgtgtttataaacacgagggagggtctgagtaggaggacctgaggaatatgtagggcagtgtggaaagggaagacatggaaatgacattgatacagctggttgttcatgccgggtgttgtcactgccccgagactgcctcattgccatgaggaaagatttgtcattttcgggaagaaggtgtggagcggctgggaggcagcacacaatagccctcctgtgggtaggatgttggctagccttgggtttacctcagtgaagacccatgtttaggatgcttgaaaacatctcattagcaactttgtctgttttaagctctggagcagtgaagaattctattaatggcagtaaactttttttttttttaagaaggaaacccaattatgtccctccattaaagttctgatagttagactttttttttttttttttcccagcaagatctctatgtagggtagggagatttcatgctactgggagcaagatgatgcttagtagtagttgatgccttaagactttgcagggtcacatagaatagcatagtcctgggctacatccaacatgcatttcaatcagttcttgggtggtggaaaagggcttgctcaatccgcttcttagcattgaaatgaaagaactcccagttctcagactggcaatgatgtgattaaaaacttgaacttgggtttctgttttccagtcgtggtaggctaggttaccctgaccacttctcctgctgaaactaagtaagattgttgaataaaatagttaaaaatacatttttttctagcgttgaagaaaggagagtaagggattctcaggtaaactgaaggagagcaggaactcagagaggcgagaacggccttggatgcagaagcaccttttgtggaggcttttcagggagcagaggacagggtctacagtttagggagcttcctcccattaagctgggggccttgcaggggcacacctgcagggtaaggtgacagaagacagccaggtttcctgaggatttgaattctgggttctccttactcatatggactcaggaccctcagactctacatttctcaaaagccaatgcagctcctcttcataggagggcacttttattctgtatgctgttaattcactttcaaaaaatcataaagcacaagaaagaagacatctccagctattagcacgaaaagacactataaataaactacaaaaattgaagatactcgaataaccagatatagaatataaaacaaccatgctatgttaaaaaaacagacagtaaccctagggatatctgtggagaccagcaaactataaaatgtagcacagcagatgtgagaaatgagtacatagaacttctggaaatgaaaaatatcacaacaaattaaaaattctaaggaaaggttgaatagtatattagttaatactctaagaagaattagggaagtagtaggtaaataagaaattatctagaacagaggtcaacaaacgtttttctgtaaaggatctgctagtgaatatttttggttttgtggaccacatatggtctctattgcatagcctttcctattttaattttgtttttacagacctttaaaaatgtgaaaaccgttcttagattacaggctatgggatatatttggcccacgggccgtagtttactgaccccaatctatatatacaaagaagagaggagtcacgagaaaacccagaagggcagttgaggcatacagagtagaatgaggaagtttaccgagcttgatcagcctaaaggcaagagaaaaaatagggcagagtaaatatttgaggaaataatagctagggattttctgaaggtggtaaaaagatactaatctgtagattcagaaagtccagtaagtcctaacaaggatcagtaaatacattctctccacgattcatcatagtgaaacttcaggacagcagacactaagagaaggtggggagtaggggatgggtacagcattgcttcctcagagagagaggtgacctctcaccagcaacagagggaccagaacacagcagaatgccattttcaatgctgaaagaaaatacctgccaacccagagctttataggcagaaaaatctttgaagaatggggttaaaatcaaaacactcacaaaagttaagagctgagagtttgctaccagccaacccatactaaaggaaattttaaaggttgcatgttgtacggaaaaaaatattcttgggtggaagatctaagctgttcaaagtataaaaagcaaagaaagtgggaaatcagtgataaaacttagattagtattgaatatatggaacatcatcttgaggggttttaaaaatattgacttgaaatataatacaattgcctgtgtaaattgagaagagtgtgaaatagatatgtttaaaaatcctcatattaccttggaaaataattttcaagcacagttttacagttgatagaaatatgaaattaagacaaaattctttactacattttaagtcgaataattgaacaaaatgttagaaataggcacaatgtagcttgctgcttgattcttgtaatcaagggggaagtggagatcaatgaactaatggtgacatttcactgctttttagtaaaattgtatgaagccatagagaaagggaaggagagacttaaataataagaaaaacctcaacagatctgtgatgcttatgatgggaagttcttttgagagaagtggagtagtgggtgattgggcctacgagtggggagtggaaggatttttgatgttgccgttgggcctccatggtatcactcccatgctgttggatttattggtctaagtgtnnnnnnnnnnnnnnnnnnnnnnnnnnnnnnnnnnnnnnnnnnnnnnnnnntgaaatgtgttaaaaaatgtttacttagtaactaggaaagatgctcctaatgtaacttgctttgtgaacaaatacgtatgaaatctacataagtgtgttaagtgtcagatttcatcatctctgggctgagtgttggtggaaacattagaggataaattagctatgagatatgttctgtttctgatttaatcttttcatttttctctttttgtttttctcaaccttttctgctacttagtgctttcttgcctctgtctcagatttttatgagccaaatattcttatattctataatctgtgttcttcccaaccagaggtgttatctgcagagactttttttatcagactgaaatccgtcctgcctttttagaatgagctcatttttcttcactccagctaatgctgacatttaccaaatccagtcctgattaagtaagcttccatcaccaagaaaactggaaaaaaggtaggattcataagacagtggattcccatccagtgcttgtagctctgttatcctctttagaagtatctgagggttaacaaaattggaaattgtagaggaaacaaatttgcactgaatttagacctaatttacctgaaaatgggattcctttaaaatccacagtgagcccacagttttgtcctgtgactgagattcagtcacaccttgaccatgtatttatttcataaattaagccttcaggccaggcatggtggctcacacctgtagtcccagcactttgggaagctgaggtgggtggatcacctgaggtcaggagtttgnnnnnnnnnnnnnnnnnnnnnnnnnnnnnnnnnnnnnnnnnnnnnnnnnnnnnnnnnnnnnnnnnnnnnnnnnnnnnnnnnnnnnnnnnnnnnnnnnnnnnnnnnnnnnnnnnnnnnnnnnnnnnnnnnnnnnnnnnnnnnnnnnnnnnnnnnnnnnnnnnnnnnnnnnnnnnnnnnnnnnnnnnnnnnnnnnnnnnnnnnnnnnnnnnnnnnnnnnnnnnnnnnnnnnnnnnnnnnnnnnnnnnnnnnnnnnnnnnnnnnnnnnnnnnnnnnnnnnnnnnnnnnnnnnnnnnnnnnnnnnnnnnnnnnnnnnnnnnnnnnnnnnnnnnnnnnnnnnnnnnnnnnnnnnnnnnnnnnnnnnnnnnnnnnnnnnnnnnnnnnnnnnnnnnnnnnnnnnnnnnnnnnnnnnnnnnnnnnnnnnnnnnnnnnnnnnnnnnnnnnnnnnnnnnnnnnnnnnnnnnnnnnnnnnnnnnnnnnnnnnnnnnnnnnnnnnnnnnnnnnnnnnnnnnnnnnnnnnnnnnnnnnnnnnnnnnnnnnnnnnnnnnnnnnnnnnnnnnaatgtttatacagggtgagcatccccagtccaaaaatccaaaatccgaaatgccccaaaacctgaaactttttaagtgctgacaggaggccacaaatagaaaattccatatctgacctcatgtgacaggtcacagtcaaaatgcaggcacacaacacatagtttcttcagcatctccaggggaataaaagaccctcttagctccctttagctgatacttgggtcccatccccaagatatctcataatgtatatgcaaatattccaaaattcagaaaaatcccaaatctgcaaccctctggtcccaagcatttcagataagggatactcaacatgtagtacttattgtagggttatttcagatgtgctgtcatattagttaaagtgaaaaattgatttgcaaagttctgatcattttagaattggtgtttaagtccagtagaaatcttcatagttaaatatatttaatattttgttataaattaagtaatgagcaactgaattttaaagaatatattcttagaggcaccctcacttcaaaagaaattgaatttcaacaaaatgccaggactggccacgcacagtagctcatgcctgtaatctcagcactttgggaggccaaggcgggaggatcgcttgaggccaggaattcaagaccacctgggcaacatagggagactttgtcattactaaaagtaaaataaaaattttaaaaaactagctgggtatggtgatgtgagcctgtagtgccagctacttgggagactgaggtggaaggatcacttgagcccaggagtttgaggttgtagtgagctatgatcatgccactgcattccagcctgggcaacagagtgagacttagtctccacaatagcaacaacaaaaagccaggactatgatttttttttttcaaaagttcttctcagtgtcagctcagaagtgataaaaggttttccacctttttttgtgtgttttttattaagaagaaaagatttgaaaggtaaatagaaaaatcttgtaaattcaccaaatcaccaaatacgtgttttgaaacatagtagtttttctaatttatcagtctcattttctaattctatccttatgaccaatatctctgcctttgctctggatttatcaccttcatggacttttggacatgggagaattttatcctgatggaagtaaaactgcacggacttctcttgtgttatagaaatatgtgtgtgtgtgtatacgtgtatatatacacatgcatatagagatatatatgcatatctagatgagcataaatgcataaattatgcatagattataaatgcataaattatgcatagatatatgcgtatacctatatatgcatatatctataatgcatgtatgtatgtgtgtgcatatatatacatgcataaatataaatatacatatatctatattgtgtgtgtgtgtgtgagaatggagtgccatccttccccttcctgggctgtaagcttgtttgttagttaagacttcatggtagaaactggtgtattcatctttaaaatattttgcacattggtggtgcttaaacggcttactgaattggactctccaagaagggtatttcttaatagaaaactgtcttgctttatttgttttcgtttacacttaactagttgacataaccctcaggacaaggactgtgggcatttctttccttgctggtcttacaagctactgatatatggcatttatgactttggcagagatggtgggttaaatcaaggggccaggattccttcatcacctaaggacttgtggtttataaatacagaagaggaaaaggagacaaatgaaattacagaaatggcctcagcttgattgagttataaccttcactgtctgatttttataactctaggcaagtactctaccttttttatttcacttcaatgtaatttatattttgctaagttgttaggtggcccagttaaccttaacaagatacttaatgttaactagttttctgaatattttcaatggtgcctctattagagagtattgtatgtaggtgaacaatgtatttcccaagcacaaattacagtatttcctcaaattatatgttctaaaggcaattgaggtatgtatgtaattatgtgttaatcaagttagtgatttgctattaattgggtaagtacaannnnnnnnnnnnnnnnnnnnnnnnnnnnnnnnnnnnnnnnnnnnnnnnnnnnnnnnnnnnnnnnnnnnnnnnnnnnnnnnnnnnnntcctcttaagtttttcatttctatttcaactcctgtgagtttaacaagattatcattttaaaagaaattccttccatctgcagatgtgtgttgcttctgatatatttgaatcagctgaaatctaaaagttttttacataggaattatctctaaagatataaaatggtcttatttttccttaatggtgttaggaaaacctaatagcaacaatggattgtgcatgatcaattttatgtagtcacattttgggggatctttaagcaagaataggcaacaagaaaatgtgcatttagtgttggaagggatgagagattagttgtggatctgaggattattcttgcctcaacaagtggagaattggagatactcttcatgaggagtgacactcaagtttgagccccgtaatcaagagacaggagaaatgttaataagagaaaaccttttattttgtcagatccctttttgaggaagaacaaatgcagtttttgaaagcattaagcatttagaaaagggtgcagaaatgtagtaggacaaaatgtgccttaaaacatacagcctctttatgtccaaagcttccacacaacatgaagtaattgtctgaaattacaagtgctactatagtgattgaactctagctgctaattgagccttcaggtttaaaaatacacaggcctcagcaattcaaagattattaaattacaccttcttgtgggaaccaacatcaatgtgtttgagcagtgagtagtgaaggtctttggggaggcaggggcagagggtgtctcattacagcgtttgccactgcagatctcttgagggttgttgctttttctcaagacgaaagattttgttaacacttcattccacagaatgttgaaaaaagtggagctctcttgcatcacatgactgttactgcaagttttgtgttgatctctgaataactagaaatttcaaaaatttacttatgaaccaaaaggcataattggtgtataactcaattatttttatttaatcctcacaacagcctatgatgtgaatggctgtgttcccattttacggatgaatatgttaggctcagaagtgacctgtcaaaggtcacacaactaagtagaattgctgagactgcatctactggctctgaagtttgtttgtttgtttttttaaactatgtcttagccatctgatgtttcaaaggttatacagtcaaaattgaatcaatgtgattgtaatgtgcctttccaaaaaagaagatgaatactggatactcactgaacacaagtggtttattctttcgttcagcaaatttattgtgcaacttttgggtgctaaccacaattttaggcagctgggaatacacgattagaaaggatctagaagattccttcctgtcttggtcaattttctgttgctataacaaaatgccacagattggggtaacttacaaagaaaagtttatttagctaatggttctggaggctgggaagtccaagagcatggtgctgacatctaatgagggccttcttgctgcatcataacacaggagagggcaccatattgcaagagcacaagagcatgtgtgtcagctcaggtttctgtacatcttcttttaaagtcaccagtaccattgtaggggtcccaccctgatggccttgtctaatcctaattacctcctgaagcctccatgtccaatcagcatatgaatttgggggttaagttttaaatgaatgaaatttggggaacatatttacatgatagaagttccttaaatagaactcagagctcaactgtgggaaggtagacgaatgaataagatagcataagtacattgaaagataagtaagaggatgatgtgttaaggagtggtttggggagtaaagaagtcacccttagtgtattagtctgttttcacaccgcggataaagacatacctgagactcggtaatttataaagaaaaagaggtttaatggactcacagtcccatatggctggggaggcttcacagtcaaggcagagggtgaaggaagaacaaaggcgaacaaaggcatgtcttacatggcagcaggcaaagagagaatgagagccaagcaaaaggggtttccccttagaaaaccagcagatctcgtgttacttattcactaccacaaaagcagtatgggggaaactgcccctatggtttaattatctcccaccagtccctcccacaacacgtgggaattatgggagccacagttcaagatgagagctcggtgggaatacagctgaaccatatcacttagatagggtggtaaacagagtcctcagtgaggagctatttctggcctgagactccaggagaatgagatgggaccaggggtggatatgccagacagaggaaatagcaaatgcaaatccgccaaggtggtacagtggcagaatacataggaggtggtgtggcagagcctcaggagcaaaatgagcccagtgaggtcaagaagcagacaaggaaagaccatgccatgcagggccctgtagaacatggaaggaagcaggattattctagatgcaatgtgaccccattgacagggctgtggattgaattatgttcccccaaaatttatatgttgaagcgctgacccccagtgtggctgtatttggagtaaggaagcaattatggttaaatgaaatcataagggtagagccctaatctgataagattagtgtccttagaagagaaacacctgatctctctctccaccatctcaacgccatgtgagaacacggtgagaaggtggctgtctgtgagccaggaggagagcttttatcagtaacataattggctgacaccttgatctttgacttctagcctccataactttgagaaataaatgcctgttgtttaagccacccagtctgtggcattttgttatggcagcctgagcagaccgagatggaactgaaagtattgtcattaactgagatggagctatctggaggaaatgcatcatttggtgaggccactctggctggatattagtcctcagtgttctgaaacacattcttccctgttggattctgtcataaatgtagttgatgatgccagctctcaccatcaaggctcataagtgctatgagccagatgcaagggttttacttaacaatgaaaattttacctgtcaggtaaactgagtctatggcttgggctgacataaagaagccatgatcacattgagaagccatgttatccatattgcatggtgaactgggactccagatagaagggcacttcattctcccactttactgtttaatggtgtcagatgtgtggctatggttccacaaagcctgactggacactcctaggccaccctccctcttgctgacttagaaacccatgctgtctgcctctaaccatctttatagtctttcattttagacctttttctgacccacattaattccttcagtcaagttacagttgaggtccattgggtctgggagccattcattctctttaagataacatcacacagctttgctttaccctttatgttaattaatcctgctgtatgtcctgattgtggaatgtctctccaagcccacagccattactctgagcttctctttctgtagtccacacctgtaaatgcacttacgttttcatacttccttgccttttattcattctcatcgctttgcctgagtattctttcctctcttcctaactcaggacagcactgcctgtattagtcttctaggctgctatgacaaaataccacaaactgggtggtttaaatagcagaaacttgtcatctcacagtctggaggctaaaagtccaaaatcaaggtttctgcaggatcagtctcctctgatggttgaggggagtctgctccaggcttctcctccagcttctgagtgctcaggcgtcaccttccctctgtatatgactgtgtacacattgtcactttataggacaccagtcatgatagattagggcccaccctgaagatttcatcttaacttgattacctgtgcaaagactctgtcttcaggtaaggtcacaggctgagagtactgggggttaggactccaacatacgttttattgtgggacattatttaacccataacattgccccttctttcctccatgagggggaacatcacatcaccagcatcctaagcccttgtttgataacttggtgatcatcactcttccaggggagcataattggtcacctatgagactaataggtctgttggccactgtccttgtaactcttctgtcatgtttattctctgacttgcctgtcacccttactagaccatagtctccttgaggacaggatcaaaccagcattgtaccctgctcctgggcacatagaaagtgttcgtagacagaacacatgggcagtctcaagtaaacatattggctgttgattgttgtaacctcttcagtctaagaataatttggctcaataaaaaaatttttagaagaagcaatagaatagcaaatcatatcattgaaaagcatagaggtttaaaatatttttaaaattaagactagttaacacactataatgaaggcacagttacattaagtctattttcttggtatgaaagatgaaaaaattaatgattttccttttaatcagccgtttaatcttgtagatagtcttcataaatttcttccaatcaccattagtaatactctttcctttttgaaataatagctcgaaatataaatatctttattttatttgctatttaaagagctgccaagtatttgcgttaggtgagatggtgcatatgatctgtagcagtttgctgtagctttcgggaggctatttgaaggaatagcttaagctatgaggcaaggcccatcagaatgtcatctttcattctttctctttgctctgtggtcacctgcccccttccaccctctgcctttttactgtgttagatcagcgtcgcttctgttttccagcataaaacccctgacctcaagtgaagaaatactggtttaacatatacggtgtaaattgttctgctttctataaacttttatactaatatttttattattttgatatttgagagggaaagagtaatataatattgcagttcatatggcagccacagtttaattttatggcaaagtcaacgactttagagttgctgaagtatttatagtactgaaagctttgtgttggcaatttctttcaaaggaagcaattcttattattatatcatggacatgcacaccactctcatgctgtttaagacacctttttgtcccccccccaccaccaaacagggaactgggagggaaaaccaggcctcaaattttgtgtgcttgcttctcatgttttatttctaagtgaattagaccatatggtcacataaacccaaagctaggtggtacagggatttaagtttgtggccttgaagtgattctagttttgctttcaattagtggaaaataatgcattcatagaacaatttataactcacacagacccattcgtgaaaagcccactccagatattgttgcgtgtgtccaggagaagtggcagcgttgatctccatagagatgactaatcagttgagactgagccctttcccttttccatgcgacagcatttatttgttgtgacactaatttcaccatgtcagttttccctgccagtgtgccccagccctaatcctcatttcacatgcatcactgttctcccctcattgaaacttggcttgaggctaacaatattaagtggcggaactgtggtttgctaaacacaactagctgatgctcatgtactcctatgaatagaaagcatcttccgaatatttccttgagggaatgggctctacaggaaatcttgagacagcccttatgttgatacatgtaaaaatatgcttcttaataatacatgttggtgataatcagataaatggagtgttgactgcgaacctgagcaatgtgcctggctaatgaataggatgtttattttctgttactactctggacataccaaaggcaactgcatcatctattaaaaaaaaaatccttagggtccgctttctcatccttcattttaatttacaagagcagtaactacttctgggactgactggagtattttctggggattaagtctggttcaaaggcctttggctgtgctggaggccataggtttcagtgtgaaataactgcctgggtgtctgtattgtcatagcttaattacagtatttgcatcttgagttgttgactgtgggttttctaagactttgagagtgctaagtgtgatttgcttttcagtttctgacccagcaagcaaatcccaggcaatgttaagtaagaaaaaacatacctgtggtttttgcagggagaaaaactcatcttcaaaattgacagcatcactgtccaacaggactttctgcagtgatggtgaggctcatctgtgctctgttcagcacctccgctcacgtgtggctagtgcaaccgaggaattgaattttaaattttatttcattttaatttatatgtaattaggcacatgcagccagtagctaccatattggatggtgtagatggagaatatctttgaagaccaaatacagttcttcctgatgatttatagtaaatttaatgtacttaggtctactccaggtatttttggtcttaagttgatttgaggattttttgaagtcatgtaaactttatgaaacatcattttgtcaagtgctggataatgattatatttactctaaaagaagatgcttgctgcttatgtgtgaagagagtaatttggtgacctcctacttcattcacaagctggaggggacaaatactatacctatactaggcactgtactttctcagtgggttgctcatatacctttagtgacccatggaatatcattacaatgttttgcaggggtattttcaaaatgccaccaccaccaacatataggcatgatgtcctccacttcttgcagctttacatagactgagatacaggaaaagctaaagtgttttgcgtactctcactcagtacaatacttctaacaccagaaatgtggggagttttcccaacatagcaaaccaagcagttttctagcagcaaacaccaactgggtgtcctacaatttaactcagttggagttggatcccacagattaagggctcagccccacaaggctctccccgaccttagaatccaatcgcaagccccaccccctgacaccccctcatggttcgattaatttactagagtagctcacaaaactcagggaaacactttacttacattttcatatttatcataaaggatgttatggatgaacagccagatagagagatgcataggtcaagtatgggaagaggctcagagcctccctgccctcctcaggaacctgcatgtgttcagcaacctgaaagctcctgaaccctgatttttggggcttttatggaggcttcaccacgtaggcatgactgattaactcactggccattggtgattcactcagccttcagcccctcccctccctggaggttgaggggtggggctggaagtcccaactctctaatcctgcctcggtctttcctgtttcaccctgaagctacctagggaaaccaagggggtagggtgacctaggggtcactggtaaccatctcattaacatgcgaaagacatcactcttgagattccaaaggtgtttggggctctgtgccaggtaacagggatgaagagcaaatacatatttcacaatatcacacacattacagacccccctgacttttgctctaatgtttctatcctttgcctcatgctacctttcacctgattggcttccgctggccttgcgttaaatccctgcaggtgtagctcactgggtaggatgggccttaggtaaagacagaatcctgagctgctctgtgggccagtcccctgggagtacctttaatttggtagagattcagaggaagattgacagtctgcgtcttctgtgatgagggtgccttttactcctccagcttagccgggaagctgccctcttccgtgggagaagttgtgctctgctcacccctctgagcttttcctcactttcccagcgaggagactctagaagttactctcagagtcacagtctgtttgccaccaatagtttggctatgcttttatgcctaagtgacaaactgtaagtttttacttttaagtaaaactcctgagtcacggaagcatgtttagtatctaagaatgtttgattctcaaagtattgaaaaagaagattctgctcacttgttcagcctctacttgatccctgttagcacagaaagatgcagtcagatttctcttgagcttggtgatatcctttataataacctttagagatccgttctattaatgaggcatgatattgttactccaattgtgcacacaagctgggggacctccctttcagaatggcatgtaaagaaattccttccctcctggaggcttcattatataccctacatgcagtgctcggcagtctgcttttaaggtgagtcattgtatagtatgatttctcagacttcaagggcagataatacacatcacgagcctcagaacagcttacttttcagccttaccttcctttacagagagagagataaagagagcaagagagtgcatgggaatacgagcgagatcacctctttgtctttttagaaatcctgtacgtgggcattaaaattaatttagagtttcttattatgtcctttcaataatagcaacaaaataattataatgacaacaatgaagtagccaccttgtgtcattttgtctttggctaagtcttgaattcctgtaatttaggtgtgagataagttggatgtaaataacattatttaaatcaagattatagggaggctggacgtggtcgctcacgcttgtaatcctagcactttgagagtctgaggtgggtggatcactcgagcccaggagttcaagaccagcctgggcaacatggtgaaaccttgtctctgcaaacattgtaaaaattagccaggcatagtggaatgtgcctgtagtttcagatactctggaggctaaggtgggagaatggcttgagcctggaaggttgaggctgcagcgaggcaagatcgtgacactgtactccagcctgagcaacagagtgagaccctgtctcaaaaaaaaaaaaaagatcatacggaaatccgactgcttcacaaacattcttttgttgttgatggaaaaaccaattgactattaagagtgatagagacaaacaaactttaatgctgtatctaaatatctgaaaacttcatcaggaaatgtatgaatttaaagcggataaactcagtcaagcttgacacagacactagcagtctctacttccggttaacagctgtttcaggagacagcatctcaaaatgagttgtcagaaaatctgcctgattttctcgagggaccgaagctacaattgggaattgagctcctgatggagtaggcatcaaataaattggacccatgaatatcaataatttcttaaaagtaaatactcagtaattctaaatactagcctttaaaatggtgacattatgctgtaactgcagtaagtcctgttagggcgctgttattagtcccataaagtgctcattcagaaataaaattctaacatgtcaaaaatcgaacccaaaactaagctataaaaaatttttaagtttaatgagtaacagtttgtcttaagccttttaaattatgacttacatgatctcttaaggcccccttggaagtttgaactgatgaagttttcttttaaatggatcttcaccaaagagtggaattgaaaataagtccatgtatcttagtttgtctctgccattgtctcatgcagttgtgttttgtttattttagtttttgaaattaaaaatgactgaaagacctgtaccaagcatttctttcacttgccttctctaaatctgttcaagtttattcagaattataattttaactctttgatatctgatcaagcagaggcctcccacattagggagttaacgactgtgaaggcttaaacttatggacacttaccatagtgtttagcaattgtttagaaaccgtaagaacaattactagatcattagcaagcacttttttttggatgggggagaagctgcaaaatatctcctgaaattgctcttagggatgttccctctaattttaaaaagtaaaggggaaaaatgaatttgcattcactggtgtgtgctgtttcagtgtcagcaccatgagttaggattgtattgtgtgtcagaactttgctctgtgctggggatgtaagaccaaagtcaccatgctcatggcttcagtctcatgaagcatgacccgtgtaacattttaaaagagacaattcataaacacacttagagagcattgtagaaataaaggagaatgtgagaaggagtgtgctaagattggggaaggttaaacttgaacagtgacttggggagaaagcacttagggaaaatgaggtatgtgaagccattccttaacagaaatcgccatagtttggggagtgttctactaaatatttgtactgcaggctgtgtaaatgaatgtcccatgtgaagaggtaattgtggctgagatcgaggatgtgacgtctcgagactccccttttggagattctcaaatcacagaaccatattaacatctctgagacatcctcctgccaggaaacctgtttaaatccgtttattgcaggattttccaaactcaattgagcatggagtccttgtaatactccatggaatgatttctgttaaatggtttcagggaatgctgtctgttggaggcatcagacagactggaaagcctggctgaggtcaggcataggaggccctataggccatgctcaagttttgaagatttcctctgtgcaaaaattttagtgtcctcacatcccctatcagaaatggaactgctataattatactgagcctctctgctttggaaagacataaaaggaaaagctggacctttgtcctcaaggggctcagagattaatgagaagacagaaatacaaactattgtgatacataacaaaattattttaaatggagcttttgcaaaatgctttctacaaagacagcgcaccccctcctgttctgcggggattcactaaagcttcaagtccagatttgcatgcctggaggatggacgaggaaagatggatgagtatggggggaagaggtgggggacgtagtggtgccaggatcaaggactgatggaagtccacagtgaaggccgtgggagttggtgagaaagaggtagaaggtgaaactggcaggatttggggagtggattttgaggacaggaaggaatatctcagaattatgaaagcttttgtctcaaacaacttagtgtcaaatacattccctgtagcagggcctttttttctaaccccctgctgtgtttctgtctagactcttgctcagcacagtagacattaagaaatatgagttgacagattgttatattttataatgtacaaaatcctatgctactaagttttaacaactacttttagttaagtgttttatatgcatggggtatcctcgggatagaatcctaatcctgtgatgaagattgtcattgattccatcaaatcacatataggtttgtaaattcttgctttaggaattgctgtctttaatctgccctacgttcttagtattcccggaaatatcatcttattattattattttctaaatctaatatcaatggacacaaaacagatatgacaatccatgaagcataaacaaacatgaacctgacatccaactaggagattccttttggttccacctgctcttcccctaccacaatctcgccttcactcctgttctgaattttgtgtttattattccctagtttttagaagcagtttctccccatatgtgcatgtttttctaaacaacttttggtttagttttgcttgtttttgaacttgaagaatattgtggctgggtgtggtacctcatgcctgtgatcccaatactttgggagaccaaggcaggatgattgctggagcccaggagtttgagaccagcctgggcaacatagtgagtcatcatctctatgaaaaataaatgtagccagacccagtggtgcatacctgtagtctcagctactcaagaggttgaggctggaggattgcttaagattgggaggttgacactgcaatgagttgagattgccccactattgcactctggcctgggtgacagagcaagaccctgtctcaaaaaaaaaaaaaaaaaaaaaaaaagattaaaaacaaatggctgcacttgaaagcacagattgagtctatagcttccagcatgagcgatgcagaagatgggtgatatctgcatttccaactgaggtactgggttcatctcactggggctagttggacagtaggtgcaggacagtgggtgcagcccaacgagcatgagctgaagcagggcgaggcatcacctcacccaggaagcacaaggggtcagggaattccctttcctagccaagggaagctgtaacagatggcacctggaaaattgggtcactcccattctaatactgcacttttccaatggtcttagcaaatggcacactaggagattatatcccatgcctggctcagagggtcccacgcccacagagcctcactcattgctagcacagcagtctgagatcgaattgcaagatggcagcaagnnnnnnnnnnnnnnnnnnnnnnnnnnnnnnnnnnnnnnnnnnnnnnnnnnnnnnnnnnnnnnnnnnnnnnnnnnnnnnnnnnnnnnnnnnnnnnnnnnnnnnnnnnnnnnnnnnnnnnnnnnnnnnnnnnnnnnnnnnnnnnnnnnnnnnnnnnnnnnnnnnnnnnnnnnnnnnnnnnnnnnnnnnnnnnnnnnnnnnnnnnnnnnnnnnnnnnnnnnnnnnnnnnnnnnnnnnnnnnnnnnnnnnnnnnnnnnnnnnnnnnnnnnnnnnnnnnnnnnnnnnnnnnnnnnnnnnnnnnnnnnnnnnnnnnnnnnnnnnnnnnnnnnnnnnnnnnnnnnnnnnnnnnnnnnnnnnnnnnnnnnnnnnnnnnnnnnnnnnnnnnnnnnnnnnnnnnnnnnnnnnnnnnnnnnnnnnnnnnnnnnnnnnnnnnnnnnnnnnnnnnnnnnnnnnnnnnnnnnnnnnnnnnnnnnnnnnnnnnnnnnnnnnnnnnnnnnnnnnnnnnnnnnnnnnnnnnnnnnnnnnnnnnnnnnnnnnnnnnnnnnnnnnnnnnnnnnnnnnnnnnnnnnnnnnnnnnnnnnnnnnnnnnnnnnnnnnnnnnnnnnnnnnnnnnnnnnnnnnnnnnnnnnnnnnnnnnnnnnnnnnnnnnnnnnnnnnnnnnnnnnnnnnnnnnnnnnnnnnnnnnnnnnnnnnnnnnnnnnnnnnnnnnnnnnnnnnnnnnnnnnnnnnnnnnnnnnnnnnnnnnnnnnnnnnnnnnnnnnnnnnnnnnnnnnnnnnnnnnnnnnnnnnnnnnnnnnnnnnnnnnnnnnnnnnnnnnnnnnnnnnnnnnnnnnnnnnnnnnnnnnnnnnnnnnnnnnnnnnnnnnnnnnnnnnnnnnnnnnnnnnnnnnnnnnnnnnnnnnnnnnnnnnnnnnnnnnnnnnnnnnnnnnnnnnnnnnnnnnnnnnnnnnnnnnnnnnnnnnnnnnnnnnnnnnnnnnnnnnnnnnnnnnnnnnnnnnnnnnnnnnnnnnnnnnnnnnnnnnnnnnnnnnnnnnnnnnnnnnnnnnnnnnnnnnnnnnnnnnnnnnnnnnnnnnnnnnnnnnnnnnnnnnnnnnnnnnnnnnnnnnnnnnnnnnnnnnnnnnnnnnnnnnnnnnnnnnnnnnnnnnnnnnnnnnnnnnnnnnnnnnnnnnnnnnnnnnnnnnnnnnnnnnnnnnnnnnnnnnnnnnnnnnnnnnnnnnnnnnnnnnnnnnnnnnnnnnnnnnnnnnnnnnnnnnnnnnnnnnnnnnnnnnnnnnnnnnnnnnnnnnnnnnnnnnnnnnnnnnnnnnnnnnnnnnnnnnnnnnnnnnnnnnnnnnnnnnnnnnnnnnnnnnnnnnnnnnnnnnnnnnnnnnnnnnnnnnnnnnnnnnnnnnnnnnnnnnnnnnnnnnnnnnaggaatgatcagacagcaacatttgctgttcagcaatattcactgttctacagcctctgctgccaatacccaggcaaacagggtctggagtggacctccagcaaactccaagagacctgcagctgagggtcctgactgttagaaggaaaactaacaaacagaaaggacatccacaccaaaaccccatctgtatgtcaccatcatcaaagaccaaagatagataaaaccacaaagatggggaaaaaacagagcagaaaagctgaaaattctaaaaataagagcgcctctccccctccaaaggaacgcagctcctcgccagcaacggaacaaagctggatggagaatgactttgatgagttgagagaagaaggcttcagacgatcaaacttctccaagctgaaggaggaagtttgaacccatcgcacagaagctaaaaaccttgaaaaaagattagatgaatagctaagtagaataaccagtgtagagaagtccttaaatgacctaatagagctgaaaactatggcacgagaactatgtgacgaatgcacaagcttcagtagccgattcgatcaactggaagaaagggtatcagtgattgaagatcaaatgaatgaaatgaagcgagaagagaagtttagagaaagatgagtaaaaagaaactatcagagcccccaagaaatatgnnnnnnnnnnnnnnnnnnnnnnnnnnnnnnnnnnnnnnnnnnnnnnnnnnnnnnnnnnnnnnnnnnnnnnnnnnnnnnnnnnnnnnnnnnnnnnnnnnnnnnnnnnnnnnnnnnnnnnnnnnnnnnnnnnnnnnnnnnnnnnnnnnnnnnnnnnnnnnnnnnnnnnnnnnnnnnnnnnnnnnnnnnnnnnnnnnnnnnnnnnnnnnnnnnnnnnnnnnnnnnnnnnnnnnnnnnnnnnnnnnnnnnnnnnnnnnnnnnnnnnnnnnnnnnnnnnnnnnnnnnnnnnnnnnnnnnnnnnnnnnnnnnnnnnnnnnnnnnnnnnnnnnnnnnnnnnnnnnnnnnnnnnnnnnnnnnnnnnnnnnnnnnnnnnnnnnnnnnnnnnnnnnnnnnnnnnnnnnnnnnnnnnnnnnnnnnnnnnnnnnnnnnnnnnnnnnnnnnnnnnnnnnnnnnnnnnnnnnnnnnnnnnnnnnnnnnnnnnnnnnnnnnnnnnnnnnnnnnnnnnnnnnnnnnnnnnnnnnnnnnnnnnnnnnnnnnnnnnnnnnnnnnnnnnnnnnnnnnnnnnnnnnnnnnnnnnnnnnnnnnnnnnnnnnnnnnnnnnnnnnnnnnnnnnnnnnnnnnnnnnnnnnnnnnnnnnnnnnnnnnnnnnnnnnnnnnnnnnnnnnnnnnnnnnnnnnnnnnnnnnnnnnnnnnnnnnnnnnnnnnnnnnnnnnnnnnnnnnnnnnnnnnnnnnnnnnnnnnnnnnnnnnnnnnnnnnnnnnnnnnnnnnnnnnnnnnnnnnnnnnnnnnnnnnnnnnnnnnnnnnnnnnnnnnnnnnnnnnnnnnnnnnnnnnnnnnnnnnnnnnnnnnnnnnnnnnnnnnnnnnnnnnnnnnnnnnnnnnnnnnnnnnnnnnnnnnnnnnnnnnnnnnnnnnnnnnnnnnnnnnnnnnnnnnnnnnnnnnnnnnnnnnnnnnnnnnnnnnnnnnnnnnnnnnnnnnnnnnnnnnnnnnnnnnnnnnnnnnnnnnnnnnnnnnnnnnnnnnnnnnnnnnnnnnnnnnnnnnnnnnnnnnnnnnnnnnnnnnnnnnnnnnnnnnnnnnnnnnnnnnnnnnnnnnnnnnnnnnnnnnnnnnnnnnnnnnnnnnnnnnnnnnnnnnnnnnnnnnnnnnnnnnnnnnnnnnnnnnnnnnnnnnnnnnnnnnnnnnnnnnnnnnnnnnnnnnnnnnnnnnnnnnnnnnnnnnnnnnnnnnnnnnnnnnnnnnnnnnnnnnnnnnnnnnnnnnnnnnnnnnnnnnnnnnnnnnnnnnnnnnnnnnnnnnnnnnnnnnnnnnnnnnnnnnnnnnnnnnnnnnnnnnnnnnnnnnnnnnnnnnnnnnnnnnnnnnnnnnnnnnnnnnnnnnnnnnnnnnnnnnnnnnnnnnnnnnnnnnnnnnnnnnnnnnnnnnnnnnnnnnnnnnnnnnnnnnnnnnnnnnnnnnnnnnnnnnnnnnnnnnnnnnnnnnnnnnnnnnnnnnnnnnnnnnnnnnnnnnnnnnnnnnnnnnnnnnnnnnnnnnnnnnnnnnnnnnnnnnnnnnnnnnnnnnnnnnnnnnnnnnnnnnnnnnnnnnnnnnnnnnnnnnnnnnnnnnnnnnnnnnnnnnnnnnnnnnnnnnnnnnnnnnnnnnnnnnnnnnnnnnnnnnnnnnnnnnnnnnnnnnnnnnnnnnnnnnnnnnnnnnnnnnnnnnnnnnnnnnnnnnnnnnnnnnnnnnnnnnnnnnnnnnnnnnnnnnnnnnnnnnnnnnnnnnnnnnnnnnnnnnnnnnnnnnnnnnnnnnnnnnnnnnnnnnnnnnnnnnnnnnnnnnnnnnnnnnnnnnnnnnnnnnnnnnnnnnnnnnnnnnnnnnnnnnnnnnnnnnnnnnnnnnnnnnnnnnnnnnnnnnnnnnnnnnnnnnnnnnnnnnnnnnnnnnnnnnnnnnnnnnnnnnnnnnnnnnnnnnnnnnnnnnnnnnnnnnnnnnnnnnnnnnnnnnnnnnnnnnnnnnnnnnnnnnnnnnnnnnnnnnnnnnnnnnnnnnnnnnnnnnnnnnnnnnnnnnnnnnnnnnnnnnnnnnnnnnnnnnnnnnnnnnnnnnnnnnnnnnnnnnnnnnnnnnnnnnnnnnnnnnnnnnnnnnnnnnnnnnnnnnnnnnnnnnnnnnnnnnnnnnnnnnnnnnnnnnnnnnnnnnnnnnnnnnnnnnnnnnnnnnnnnnnnnnnnnnnnnnnnnnnnnnnnnnnnnnnnnnnnnnnnnnnnnnnnnnnnnnnnnnnnnnnnnnnnnnnnnnnnnnnnnnnnnnnnnnnnnnnnnnnnnnnnnnnnnnnnnnnnnnnnnnnnnnnnnnnnnnnnnnnnnnnnnnnnnnnnnnnnnnnnnnnnnnnnnnnnnnnnnnnnnnnnnnnnnnnnnnnnnnnnnnnnnnnnnnnnnnnnnnnnnnnnnnnnnnnnnnnnnnnnnnnnnnnnnnnnnnnnnnnnnnnnnnnnnnnnnnnnnnnnnnnnnnnnnnnnnnnnnnnnnnnnnnnnnnnnnnnnnnnnnnnnnnnnnnnnnnnnnnnnnnnnnnnnnnnnnnnnnnnnnnnnnnnnnnnnnnnnnnnnnnnnnnnnnnnnnnnnnnnnnnnnnnnnnnnnnnnnnnnnnnnnnnnnnnnnnnnnnnnnnnnnnnnnnnnnnnnnnnnnnnnnnnnnnnnnnnnnnnnnnnnnnnnnnnnnnnnnnnnnnnnnnnnnnnnnnnnnnnnnnnnnnnnnnnnnnnnnnnnnnnnnnnnnnnnnnnnnnnnnnnnnnnnnnnnnnnnnnnnnnnnnnnnnnnnnnnnnnnnnnnnnnnnnnnnnnnnnnnnnnnnnnnnnnnnnnnnnnnnnnnnnnnnnnnnnnnnnnnnnnnnnnnnnnnnnnnnnnnnnnnnnnnnnnnnnnnnnnnnnnnnnnnnnnnnnnnnnnnnnnnnnnnnnnnnnnnnnnnnnnnnnnnnnnnnnnnnnnnnnnnnnnnnnnnnnnnnnnnnnnnnnnnnnnnnnnnnnnnnnnnnnnnnnnnnnnnnnnnnnnnnnnnnnnnnnnnnnnnnnnnnnnnnnnnnnnnnnnnnnnnnnnnnnnnnnnnnnnnnnnnnnnnnnnnnnnnnnnnnnnnnnnnnnnnnnnnnnnnnnnnnnnnnnnnnnnnnnnnnnnnnnnnnnnnnnnnnnnnnnnnnnnnnnnnnnnnnnnnnnnatattgtgatcctctggtttttcctgaaaaaatgtatccatgttttaatacaggtatagttcctcttcactgctgagtattgttacatcatagcatcatgttttcatcctttcttctgttgatggacatttgggttgcttgcagttttttgttgttatgacagtgtctttgtgaacattcttgtatataacccctgctgtgtgaagctttttctaccatttatatatggtaagagacagggtccagtttcatccttctgtgtatggacatccagttttcacagcactatttattaaagagactgtccttttccctatttgtattcttggcaccagtgttgaaatcaattgaccgtatatgtgagttcatttttgggccttctattggtgagtctttttttgtgtgagtatcatgtagttttcattactatcactttatagtannnnnnnnnnnnnnnnnnnnnnnnnnnnnnnnnnnnnnnnnnnnnnnnnnnnnnnnnnnnnnnnnnnnnnnnnnnnnnnnnnnnnnnnnnnnnnnnnnnnnnnnnnnnnnnnnnnnnnnnnnnnnnnnnnnnnnnnnnnnnnnnnnnnnnnnnnnnnnnnnnnnnnnnnnnnnnnnnnnnnnnnnnnnnnnnnnnnnnnnnnnnnnnnnnnnnnnnnnnnnnnnnnnnnnnnnnnnnnnnnnnnnnnnnnnnnnnnnnnnnnnnnnnnnnnnnnnnnnnnnnnnnnnnnnnnnnnnnnnnnnnnnnnnnnnnnnnnnnnnnnnnnnnnnnnnnnnnnnnnnnnnnnnnnnnnnnnnnnnnnnnnnnnnnnnnnnnnnnnnnnnnnnnnnnnnnnnnnnnnnnnnnnnnnnnnnnnnnnnnnnnnnnnnnnnnnnnnnnnnnnnnnnnnnnnnnnnnnnnnnnnnnnnnnnnnnnnnnnnnnnnnnnnnnnnnnnnnnnnnnnnnnnnnnnnnnnnnnnnnnnnnnnnnnnnnnnnnnnnnnnnnnnnnnnnnnnnnnnnnnnnnnnnnnnnnnnnnnnnnnnnnnnnnnnnnnnnnnnnnnnnnnnnnnnnnnnnnnnnnnnnnnnnnnnnnnnnnnnnnnnnnnnnnnnnnnnnnnnnnnnnnnnnnnnnnnnnnnnnnnnnnnnnnnnnnnnnnnnnnnnnnnnnnnnnnnnnnnnnnnnnnnnnnnnnnnnnnnnnnnnnnnnnnnnnnnnnnnnnnnnnnnnnnnnnnnnnnnnnnnnnnnnnnnnnnnnnnnnnnnnnnnnnnnnnnnnnnnnnnnnnnnnnnnnnnnnnnnnnnnnnnnnnnnnnnnnnnnnnnnnnnnnnnnnnnnnnnnnnnnnnnnnnnnnnnnnnnnnnnnnnnnnnnnnnnnnnnnnnnnnnnnnnnnnnnnnnnnnnnnnnnnnnnnnnnnnnnnnnnnnnnnnnnnnnnnnnnnnnnnnnnnnnnnnnnnnnnnnnnnnnnnnnnnnnnnnnnnnnnnnnnnnnnnnnnnnnnnnnnnnnnnnnnnnnnnnnnnnnnnnnnnnnnnnnnnnnnnnnnnnnnnnnnnnnnnnnnnnnnnnnnnnnnnnnnnnnnnnnnnnnnnnnnnnnnnnnnnnnnnnnnnnnnnnnnnnnnnnnnnnnnnnnnnnnnnnnnnnnnnnnnnnnnnnnnnnnnnnnnnnnnnnnnnnnnnnnnnnnnnnnnnnnnnnnnnnnnnnnnnnnnnnnnnnnnnnnnnnnnnnnnnnnnnnnnnnnnnnnnnnnnnnnnnnnnnnnnnnnnnnnnnnnnnnnnnnnnnnnnnnnnnnnnnnnnnnnnnnnnnnnnnnnnnnnnnnnnnnnnnnnnnnnnnnnnnnnnnnnnnnnnnnnnnnnnnnnnnnnnnnnnnnntatttattttgagtcgtattttgggttatctctctagtctagctaaggtttgtcaattttgtttgtcttttaaaaaatccaactcttagttttgttgatcttttgtactatttttctagtctttattttatttatttctgctctgtattagtccgttttcatgctgttgataaagcacacccaagattgggaagtaaaagaggcttatttggacttactgttcctcatggctggggaggcctcagaatcattgtgcgatatgaaaggcatttcttacatggctgcagcaagaaaaaaatgaggaagaagcaaaagcagaaatccccagtaaatgcatcagatcttgtgagactattcagtatcaccagaatagcacaggaaagactggcccctgtgattcaattacctccccctgggtccctcccacaacatgtgggaatcctgggagatacaattcaagatgagatttgggtggggacacaaccaaaccatatcatgctctgatcttaattatttctttcctttcactcatagtgagcttagtttattcttctttttctgtttccttgaggcataatattaagttgtttctctgagatcattcttctttcttagcataggcatttattgctgtaaaaactttcctcttgcaactgtttttgctgcatcccatgagctttggtatgttgtgtttccttttttgtttgtttcaatatatttttaaattttcctataatttatttattgatccattggttgttccgaaggatgtttaatttttatgtatttgtgaatttttgttttgaaatttctcctgttactgaattctagtttcataccattgtagtcagaaaaggtgcttggtatgattccaggtttattaaattttctaagacttgtcttgtggcctgtcatatgatctgtcttggtgaatgcttcatatgtgcttgagaagaatgtgtactctgttgttgttggatggaatgttccatatctgtctgttannnnnnnnnnnnnnnnnnnnnnnnnnnnnnnnnnnnnnnnnnnnnnnnnnnnnnnnnnnnnnnnnnnnnnnnnnnnnnnnnnnnnnnnnnnnnnnnnnnnnnnnnnnnnnnnnnnnnnnnnnnnnnnnnnnnnnnnnnnnnnnnnnnnnnnnnnnnnnnnnnnnnnnnnnnnnnnnnnnnnnnnnnnnnnnnnnnnnnnnnnnnnnnnnnnnnnnnnnnnnnnnnnnnnnnnnnnnnnnnnnnnnnnnnnnnnnnnnnnnnnnnnnnnnnnnnnnnnnnnnnnnnnnnnnnnnnnnnnnnnnnnnnnnnnnnnnnnnnnnnnnnnnnnnnnnnnnnnnnnnnnnnnnnnnnnnnnnnnnnnnnnnnnnnnnnnnnnnnnnnnnnnnnnnnnnnnnnnnnnnnnnnnnnnnnnnnnnnnnnnnnnnnnnnnnnnnnnnnnnnnnnnnnnnnnnnnnnnnnnnnnnnnnnnnnnnnnnnnnnnnnnnnnnnnnnnnnnnnnnnnnnnnnnnnnnnnnnnnnnnnnnnnnnnnnnnnnnnnnnnnnnnnnnnnnnnnnnnnnnnnnnnnnnnnnnnnnnnnnnnnnnnnnnnnnnnnnnnnnnnnnnnnnnnnnnnnnnnnnnnnnnnnnnnnnnnnnnnnnnnnnnnnnnnnnnnnnnnnnnnnnnnnnnnnnnnnnnnnnnnnnnnnnnnnnnnnnnnnnnnnnnnnnnnnnnnnnnnnnnnnnnnnnnnnnnnnnnnnnnnnnnnnnnnnnnnnnnnnnnnnnnnnnnnnnnnnnnnnnnnnnnnnnnnnnnnnnnnnnnnnnnnnnnnnnnnnnnnnnnnnnnnnnnnnnnnnnnnnnnnnnnnnnnnnnnnnnnnnnnnnnnnnnnnnnnnnnnnnnnnnnnnnnnnnnnnnnnnnnnnnnnnnnnnnnnnnnnnnnnnnnnnnnnnnnnnnnnnnnnnnnnnnnnnnnnnnnnnnnnnnnnnnnnnnnnnnnnnnnnnnnnnnnnnnnnnnnnnnnnnnnnnnnnnnnnnnnnnnnnnnnnnnnnnnnnnnnnnnnnnnnnnnnnnnnnnnnnnnnnnnnnnnnnnnnnnnnnnnnnnnnnnnnnnnnnnnnnnnnnnnnnnnnnnnnnnnnnnnnnnnnnnnnnnnnnnnnnnnnnnnnnnnnnnnnnnnnnnnnnnnnnnnnnnnnnnnnnnnnnnnnnnnnnnnnnnnnnnnnnnnnnnnnnnnnnnnnnnnnnnnnnnnnnnnnnnnnnnnnnnnnnnnnnnnnnnnnnnnnnnnnnnnnnnnnnnnnnnnnnnnnnnnnnnnnnnnnnnnnnnnnnnnnnnnnnnnnnnnnnnnnnnnnnnnnnnnnnnnnnnnnnnnnnnnnnnnnnnnnnnnnnnnnnnnnnnnnnnnnnnnnnnnnnnnnnnnnnnnnnnnnnnnnnnnnnnnnnnnnnnnnnnnnnnnnnnnnnnnnnnnnnnnnnnnnnnnnnnnnnnnnnnnnnnnnnnnnnnnnnnnnnnnnnnnnnnnnnnnnnnnnnnnnnnnnnnnnnnnnnnnnnnnnnnnnnnnnnnnnnnnnnnnnnnnnnnnnnnnnnnnnnnnnnnnnnnnnnnnnnnnnnnnnnnnnnnnnnnnnnnnnnnnnnnnnnnnnnnnnnnnnnnnnnnnnnnnnnnnnnnnnnnnnnnnnnnnnnnnnnnnnnnnnnnnnnnnnnnnnnnnnnnnnnnnnnnnnnnnnnnnnnnnnnnnnnnnnnnnnnnnnnnnnnnnnnnnnnnnnnnnnnnnnnnnnnnnnnnnnnnnnnnnnnnnnnnnnnnnnnnnnnnnnnnnnnnnnnnnnnnnnnnnnnnnnnnnnnnnnnnnnnnnnnnnnnnnnnnnnnnnnnnnnnnnnnnnnnnnnnnnnnnnnnnnnnnnnnnnnnnnnnnnnnnnnnnnnnnnnnnnnnnnnnnnnnnnnnnnnnnnnnnnnnnnnnnnnnnnnnnnnnnnnnnnnnnnnnnnnnnnnnnnnnnnnnnnnnnnnnnnnnnnnnnnnnnnnnnnnnnnnnnnnnnnnnnnnnnnnnnnnnnnnnnnnnnnnnnnnnnnnnnnnnnnnnnnnnnnnnnnnnnnnnnnnnnnnnnnnnnnnnnnnnnnnnnnnnnnnnnnnnnnnnnnnnnnnnnnnnnnnnnnnnnnnnnnnnnnnnnnnnnnnnnnnnnnnnnnnnnnnnnnnnnnnnnnnnnnnnnnnnnnnnnnnnnnnnnnnnnnnnnnnnnnnnnnnnnnnnnnnnnnnnnnnnnnnnnnnnnnnnnnnnnnnnnnnnnnnnnnnnnnnnnnnnnnnnnnnnnnnnnnnnnnnnnnnnnnnnnnnnnnnnnnnnnnnnnnnnnnnnnnnnnnnnnnnnnnnnnnnnnnnnnnnnnnnnnnnnnnnnnnnnnnnnnnnnnnnnnnnnnnnnnnnnnnnnnnnnnnnnnnnnnnnnnnnnnnnnnnnnnnnnnnnnnnnnnnnnnnnnnnnnnnnnnnnnnnnnnnnnnnnnnnnnnnnnnnnnnnnnnatcctggccaacgtagtgaaaccctgtctctactaaaaatacaaagcattagctgggtgtggtggtgtgcacctgtagtctcaactacttggggaggctgaggcaggcagaattgcttgaacctgggaggcagaggttgcagtgagcctagatcacgtcactgcactccagcctggcaacagagtgatattccatctcaaaaccaaaacaaaacaaaacaaaaatggaatagtttttgtataaagcctatgcacatcctcccatagactttaaataatctctagtattacatgtaatacgtaatgcaatgaaaatgctatgtaaatacttgttatattgtatttttaagtttgtatcattttttattgttgtgggttttgtattgtttctttctgaatattcttgatctgctgttggttgaatccacagatgtggaacccatgaatatggcgggctgactattatgactgtattcttgcagttcatggaatttctttaagaggatttttctaaattttttgtcatcattttattgatctccctttcattagggtcaatttttggagctttgtcagtttcttttggagatgtcatgatttcttcctgagtccatgtaatccttgtgtccttgcgttggtgtttgtgtacttgagataacaaccttttccagctttcacaggcattctttggaacagacccttattatgtagtttaacctgcaattctggttgggctagctggtaacagccttgggcaggcagagcttattttggagttctctaaatgtctggggtgctgcctttaccttgaattcacatggggcagctggctggactgagcttcacaatcaggctgagctgctggatgggcactacagtagcctcagatcaggccagggtgtgttctctgctcaagtggtaccactatttgagttctgcagttggccagggttgtgggaggggcctcaaagttaagtggagacactgagatggacaagaccagatgctatgcacaatggaaatgcatggttgaagttttccttcctgcctgtgtggggccttagggtgagttaagtgttgaggttaagtgctgtgtaaactttccctctgctgtccctgctcttcaatgaagtttgctgcattggttgtctccctgcctgggtagggtcttggggtaagctttgaggtcacaccaggtgttgttagactcccaggtgtggcacaactagctttccattttgctgcaattccctgtggtggttgttgtcctccatgggcagggccctcaggtagagtccaaggctggtcctggattgtgcctgtctaggaattcaagccaggtagcactttccacctcttccaggagtgatcagctcagctttgcctgtgagctacactgttagctggtacctctaatcaggtacttttgctgccaggtacacaaagctaccaccaagatctgtacactcattgctttgtttccacctgaccccaggtggtctagttgtgctgtattccgctgtgttccctttgaggtgagaccagagtggacttcctaagaagcatcttggaatgctagggaagctggatatttgctttcgggttctcttttccctctgtagaaaccatggtttttgggaaatcccgtctgtgaggccctgggccaacttgagggatggggtggggcaatgttgtcaaagtgagatagtttctctcaccctttccatgcggcttttattccatgctgtggaccacacaagtgactctgacttattcctaacttggggagttttcaccaaggcgttcttgtctgtggatagttgctagttgaactttttgtggggtaggggggtagtgaaacctgtgacctcctatcccaccatcttgctgatgtcgtctgaattctctttgtacattagttttgtgatctaggaactctgaactctcttattaattctaatatgtagattattctggatttttaaatgtaaacaaaaataccacttctgaataacagtttggatatacccttccagtttttatggtctatttctttttctcgacctatctagcttactagaacctccactgcaaaatagaagtagtgttggggccaaacagaagtagcgttaagggtacttcagctttttttccaatttgaattctactaatgttttacatttaaggatgatgcttattgtagattttctgtaagtactgtttatcaggttattatgaacattgtttcgagtgtatcaactaattttcctgtatttattgacatgatcttatggtttttcttttttaatcttttgatttgtgaactacattcaataatttcccaatgttaaaccaatctagctttcctagaaatagccaacttggtcatgatgtgttactttttaaaatacattatttgattttgttttaggtatttgtttaaaattttatatccatatttgaatgtaatttgcctatagtgttcattttcctgaattgtccttattggattatggtaccacagttacattatccataataatgagttagggaagctttccctctttatctcctttgacttagtttatgtaaagctgaaattatttcttccttgaatgcttgatagaactcacttgaaattttctttgtgagaaaatttaaactactaagtcaacttctttaattattataagattattcggccaggcgtggttgctcaaacctgtaatcccagcattttgggaggccaagatgggtggatcatgaggtcaagagatcgagaccatcctggccaacatggtgaaaacccatctctactaaaaatacaaaaattagctggtcgtggtggcgtatgcttgtagtcccagctactcgggaggctgaggcaggagaatcacttgaactcgggaggcagagattgcagtgaatcaagatcacgccactgcactccagcctggcggcagagtgagactgtttcaaaaaaaaaaaaattattcatacattctcatttcttagaagtcaggctgttatagtaagcttttttttctgcagatttattttattaaattttcaaatttattggcctaaagttgttcacacctatcatcttttttatttatgactatagcatctctcagttttattcaagttatatatttcagattttatttattagagaattgtgatcaggggagtttattagatttttcaaaggacaaccttttggctttgtccaacagacattttaggtatgtgaattatacctgttaattttgctcttatctattgtggtattagtatttttcttgtcagtgtcttctaaagtatgtctttatatatttaaggtattcattatttaactgatatcttggttataaataattatctctgtttttctttaattttgattttagtcaattttttgtttataattttgtttattacttttgtacttagaatcatcctttatttagaaatgaaagattaaaaaaaattttttaacattagttttatttgtatctctaactgtaatcaaactatgtctctgatctggaattttattccgacctatgatgttaagacttcaaatctatggttgaaaattccagctttatgatagaatcacctgaagtgctttttagagacatttgcccagttcccttcagttcccttccgcactcactaaatgtaggggtgggatggggtggtaaaatctcagaatatttaaaaaatatatatcatagacagttcttgatgcacaatcaggtttggaaaccactgatttaaatatatttattttccaaatagctacctgattgttccagcgccattcattgagcaagctttttccttattactggtttgggattcctcctttaccatgtgtgttaaactccagagtatgctgggggttgttctgtggctcattggttctattagcagtcttgtgccagcgtcacagacttagtgattcaaactttatgacatattttaatgtttattaatgctagacctccctcttccttattcttattttttaaaacgtatctcatctttctcctcaaaaaatttaggatatttttcatttaaacatgttattcagaacaaggttggttgtatgtgatcatcttttccatgtcatttccactgctttgttgttaagataatttcttctgtgtgtaaacttgtgttgttacataattattttctttgagtttgtgagaaatacgtaatttccttgattttctaactggctcttattggtgcataggaaagttcctgattttctttcagtagagtttttaaagcgcactctgccttttggctctgctgagattctttcagttcctggattgtgtctcttgtccttgcactgactgtgccattcttccttttatttggaatgttcttcatcactgcccacactcccacctgtacctaatgatttcttaagctttagatttctgctgaatcatcccttccccaggatgttccttcagacttttcactaggtcatgacctcctgctgtgtacttcatcacaatctacatcttctgttacagtgctctgtttcagtgcaatcactcttccctgctggattgtaaacgtcttcaggtccaggaaggttttttgttttgtttaagtctttaaaccatctgagttaatttttgtctatggtgtaaggaaggtatccagtttcaatcttttgcatatggctagccagttatcccagcaccgtttattgaatagggagtcctttccagactggataaaggtggtacatatacaccatgggatactatgcagtcataaaaaagaatgagaccatgaccttcgcaggaacatgggtggagctggagttattagccttagcaaactaatgtaggaacagaaaaccaaataccacatgttctcatttataaggaggagctaaaggatgagaacacatggacacatagaggggaacaacagacactggggcttactggagggtggagagtgagaggaaggacaggatcagaaaatacaactaatgggtactaggcttaacacctaggtgattaaataatatgtataagaaacccccatgactcaagtttacctatatatcaaacctgcccatgtaatcctgaactttaaaataaaagttaaattaaaaacaagatttttgtttttgtttttgctgttgtctccttaatcaggagagcagaccgcacacaatgggtatttaataaattgcttaaatgaatgcatgaatgcttgcttcagcaacataactttggcaatgtggagattgtggtggaataggagagaagatgtagagaagccaaatgaaatctgttccaacttttcaggcagaggaggataagcatatgagctaaggtagacttactcaggatagagggtaagggttagctttcagagtgaagaggtgtgattggcatcaattaggtgctgactggatgctggcgagagagagagaaccaggtgaatgggatacctctggaggagctggccttgggaagaaaggtgagggaaaggtggggacatttgctttcctccctgtacactgtgaaggtaaggcatgagggagaatgcccctcagaaactgttgtttgcctcaaaatccaacaaagctctttttaggtttgaaaagaaagcagttcttttttgctcattcatagaatacctttcagtgagttgcttctaaggacggtagcagagtttttgctgtcattgttttgttttattttttggtttttagacggtctcactctattacccaggctggagtgcagtggcacgataagggctcagtgcagcctagacttcctgggctcaggtgatccttccacctcagcctcccgagtggctgggaccacagatgtgtgccatatgcctgactaatatttgtaatttttatggagatgggatttcatcatgttgcccagatagttttaaactcctgggctcaaatgatctgcccgccttggcctcctcccaaagtgctaggattacaggcgtgagccactgtgccctgcccttggtagagttttgaagacagttgttatgatgttaagtcattgcactgagtcactaggccatcctttggctttacaggacataaaatatgggagtttcatcaccagacagtgggcggtactgggtttcctactgggtggacagtcctgctagtgggagagttctgtccttagtctgtgcccttggactgtagatatagacatagaaggtcatctccctttatttcgcctttctgccttcattgtcactggggagacagtccccccaagtcttcctgtgtgtgacgctgtgcaggtggtacatagaaatgcccatcagtgatacttattttgatgctgctgtgatcctgagaattttcccacttataggtgctctctttgggatatctgttggcattcaactgttttcaacagaagtctccaaaattggtactcatccagggttatgttaactgcccagtgtaccgaagggtgatgtggacaggtggaaaaagactgggttaatctcttagtgagactaagtgtttttttacaagtggttggttgtctgagggttagaagacttagaagagttttacattctacattgaggaagtaggcactcacccatggtgggtggtctgatgtccttgtttcttcagtggagttcttttttctttttttcttttctttcaagacagagtctcactctgtcacccaggctgagtgcagtggcacaatgtcagctcactgcaacctccgcctcctgggttcaagcaatcctcctgccttagcttcccaagtagctgggattacaggcatctgccaccacgcctggctaatttttgtatttttagtagagacagggttttgccatgttggccaggctggtctcgaactccgacctcaggtgatccacccacctcggcctcccaaagttttgggattacaggcgtgagccaccacacccagccatcagtggagctcttaatgtcatttagaacattattattgttgcagttgaactggagatggtaggaaatagtgaagttctgcagttgttgaaacaagatgctccctcaactgtgctgttccccacagtagagaggtaagacactccagaggagttgatggtcgagcagctatctgatgcctctaactgggaatggtctcacagattccttactgaccttaagcatcagtagtttgcttcccaagcttgtggccccaaactaaatctctttaaaaaaaaaaaaaagcaaaaaacccgaaagtacatgattagatcttgcaatacaattattgacaatgtattttctgtagtttaaatgaatcacttataaaactttagtgaatgggatacgtaccttatgtggttttagaaatattcgtgtgcaaatgggcagaatgaattggagttcaggtcactttgccaacttgtgagatgtcactagatttcaatgtatgtaaataaacaagctcgtctttccaaatacaactgcacttgttatttccaagagtctttcaacaaatgggataggaattcacaggcagggtcccagtgcctggttgaatctgactccccctgtgtaaccttggacccatcgctgaaaccctatgccttcgtgtcctttttgtaaaatatggacaccatcagtactcaggaacaccatgaggaccaaataggtttacacacgtaaatgcatggagaacagtagctgacagtgctcaagtgctcacattagcaaaatgaagtgattccctagtgaatcacactattacttaaagttggattttttttttgttttttgaaatggagtcttactctgtcgcccaggctggagtgcagtggcatgatctcagctcactgcaacctccgcctcctgggttcaagtgattcttctgcctcagtctcccaagtagctgggattacaggtgtgtgccatgatgcccggctaatttttgtatttttaatagagacaaagtttgaccatgttggccaggctggtcttgaactcctgacctcagatctgcccacctcggcctccgaaagtgctgggattacaggcgtgagccaccacacccagccaaagtttgatttttttaaaacttaaaagtcccaatggattcagatcattgagatttgtaacctattattaacatacattttctggctgggcatgggaggcagaggttgcagtgagctgagatcgtgccactgcactccagcctgagcaacagagtgagactctgtctcaaaaaaaaaaaaaaaagatatattttcttcagctgggtgtggtggctcacacctgtaattccagcattttgggagtccgaggtgggtggatcacttgaggccaggagttcaaaactagcctgggtaacatggtgaaaccctgtctctactaaaattacaaaaattagctgggcatggtggtgcatgcctgtaatcctagctactccagaggctgaggaaggacaatcgcttgaacccaggagatgaaggttgctgtgagccaagattgcaccactgcactctagcctgggtgacagatcgagactctgtctcaaaaaaaaaaaaaaaaaaaaaaaaaagacagatagttttcttcattaattcgggatatatattgtccaggggagttggggaaaagcctagacttaagacctaacacactgactttataactccagaaagccacatgaaatgagtttggtgttcaggtcaggaaaccaaagtgcaaaataagaggaggagctgtctgtatcctcttatgccttgtctggaggtgtgtaggaggctgagaatggtttagtgagcacattgctatacatcagtgatctcttccctcctgtctcagatactgactctgtgccccggggtccctctccgtgaagcaggagttacacgctcagatgcctggaggggtgagacagcaacataaatgtctttcatgggccagatggggactgtcaccagcagcagagcatgttcagccactactcattgccaagcagttgtttcctgtaggaattcaggcccagtgttccagaactcctgatttttcaagaagagacagaaatctgtactgcatagcccaaataaatcttggattagatgctggctgcaaccacactagtttgcaatttttgtaatgggaagaaaatatttatgatctatgtaacacacaaatgttggtgttaaacagatacttttactctagaatctttgggtaaaatgaagtctgatgaccttgttaaaacatattatgtaatgcttgactttggtcattcaggaaatacctactgtgtgcgttaacacgtaatttagtacatattttctctttaaaatgagcagttgctacaaatgaaacctggcccagaagtagcagattgtcattctgcaaaatatttgggagacctgtcttttgccttttaggttttgttagtttgatggaggtaacgttacttttggttcttccattgtatttaattgacagtatcatcttctaaagaatttcagttttacagattggagtagtgaactcagggaagcattaaaaactagtagaaagatttgagtagattgggcaacttggcaccaaggccactggtagggacgtgcacactcttttcttaataacttagaggtgatgaactcctgattgattgcctcagctaacagatatttggctgtcactaaaaattatctaagttgtattacttgaaaacttagaatttaaaagtgttaccatagaggcagatgtgcctctagaattacctgtgtccagaccaccaaaaatgaccagacattccccttgcttcatatgagtgactgctacttcttgactttttaaagagttagctttggccaggcacggtggctcacaccggtaatcccagcactttgggaggccgaggcaggcagatcacctgagatcaggagttcgagaccagcctggccaatatggtgaaacccccgtctctactaaaaatataaaaattagccgggggtggtggtgcgcacctgtaatcccagctacttgggaggctgaggcaggagaatcacttgaacctgagaggcagaggttgcagtgagcagagatcgcaccattgcactccagcctggatgacaagagtgaaactccgtctcaaaaaataataaaagagttagcttcactttgtttgcttttcctatcttccagataaaattatcaagagattcagtcacagatttgcctctgctttcagacactgccaaatccagagcaaaaccatacttctctgaactttccccaaaatcatctaacaagagcccaaattccctcctacagctcttttgctcagagccaccccatagtttcccacctgctggctccctgattacaaagagtcaataaactcaacctggtactactgtagtctgctcctggtgagctgtggatgaagggtattgctacctaggtaagatttgatgatattattacaccattatttacttgttggcatttgtgaaatattaaaggtagcagggcctatcataggaggaaaggaaggttgatggtaaaaatggaatgatctatttcagcaaaagctgcctaagaaatcgtctccctcagaaggttatgtatgtgcaagctcttcactccctggaagagccagtgagtcactccaggcagtcttgcaaacggtcgtttgattcgagttacagatagtaggaggtgaccctttgaaatctatttagaaaaagttctttctaaaagctatcgattgtgctgattatgatcatagcaggtttcaacctgctgtccaagtctggaactttaggcaagttaagatcaacaagcactctgcgatcgagtttcatttaattagagtttgctgccaagtcaggttttgaggccaactgcatgccaggcgcctttcaatggttgtctgtctgagctgggggaacgttggaggatgctctgccctttctccagtattaaccttagaccaaatcccaggggcttgccctgagataagctatctctacaccactggaaagagaatgctttgctgcaaatgcatgaaggcagagcaaagatgtaaggcaaataagtgggaaatccagttcggtaggcttttcccaaaagcgagagaaaagcgttcgtagtcctttatcaggatggtgggggaaaaagaaaaagtaagctgacttttattttttcaagtcactttcctaagaaacttgtaaggacctctctaaggcactgctatctgtctttgtagggcaagcgtgaagctttcccttgccagctttgtgatgtcattgaattaataatactgtaaaggctagatcagaagtcaatttggcagctgtgcctttagggaaatttttgggagagtgaccttccatttctaataagcatgttattacatttagaattaaattactaagagccaagctaccctcttgaatttgctattagccattttttcccttttatttttaatgaactagaacaagttgaagccagttgtttctattagtaatagtacacagtaagaaaggaacaaaaaatcttttactatcaggccctttatgttggacaagtttagctcttctaaatatcagaatttgtgaaagacttccacaaagtctatttcttttttcttaatttgggtagagtgggagaagccagtgggttcctttcaccaattttatatttgaatgcctcctcatgtgtgagttttcttccttaaagtgagaaagatcatcttcatttcaacgtttgtgtgattctgaaattcatgtggaatataaatgggccccaaagtccaatggtatattctgtaacaatgcacctacagagtatttaacccatcaaccactagagcccaatttaaaacaccagtccttaaggcagggtggtacccgggctgatgtaaatgaatagacacccagagggcagttgagaaatagctagcaagcaagttggatcaattttaatatcaaatcacactctcaaataagacagaagaactttttacgaatgatgttggcagagagagatggcagtttggagccaaaatttaaatcccacactgtaaacctaaaacaaacataaaagggtgctccaggttaactaaagatgacaaattattgaattgtggaaaacatagaaggaaaaaaaaaagagagtatgttcagatatgaagcaataaaccaagtcacaaagctggaaatattccctcattaaacaatacctctttaagagcaggggctgtcacaacaacttggtaatattccacacatttgctaaggtaaattcaacaatactatacgtggaaatgctgctactggggatcccggttaccccaaaagggactctttcctgtttggcttcatgaagacaatacataaaaccaaaagtgagtgccaagcagtgcagactttattcgatggtcatggaatggagaagtgggagcgtagcttgcatatcaacaactcagctcttgagaactgggaagttacagatataggggattcttcattttaataagcctgtaatgatggcccatttgtgtctgtgttcacacgtgcgtctctgagagacagagacagagttcactacatgtgggtatggtatttagattcctctattggaatgcaggttccttgaagctcaaggatattgtgatgcacaggtgctctgacccaggaacacagcctggcctgcctatcagatacggaccacaggaaccatctgttctactactcttccacacccaaaaaacctgccactgccgaggctacccctaccaagtctaggtgtgtacattagcttaaaataattcatggtattattaaaggtcaaaattatttctctctttgtacctttattgattccgctgatattcatccatttgcttattgactggtgttttcattgtggtagagccacacaatttttgtttttgattgtcattacttatatagatttttgagaggaacctaagattgtttttttctttcttgctcattaacttgtaatatctcaaatatatacttaataaagtaaaaattgacttaagtaaagggtgagaaaaagattatgaacttaagaaggattaaaaccaatttgcatagctctggagagactgtctttccttgtattacttggggaaagcaaaaattaaaagagatgagatctattatctgaaacatggatagtgtgacctacccagagtacctactttttaaccttccagtgggtgttgaaatctgattcagcacattcttggagagtgatgagtaaatttgttgttatataaagatttttcaaaaataagcatcggattcaaacatgagtagaaaggatgagatgttaatttaagtgattatgggaagctgtgatttatacacatgaaatcattcatttagagatgggtagtaagaacaatgaggatcttagggactgagtatctgtttcctaggacactagagacagcattaggtagtgattaacttaagaattctgaagtgtgattgcctagatttgaatcctggttctagtcctttctagctctctgaccaggagcaaattacctaagctgtctctgcctggaccttcccatctgtaaaatggtgttaataataacatctacctcatagcattattgtgaggataaaagtgagttaatatatgcagatttctagaagagtacatagcatattgtaagcgctgttatacacatttactctcattacttgccatgatgagtgtgcagaggttaaccaggagacaaaaggaagctcacaccccagttgttttgtgggctacattcttggcgatgttttatcgttgcccctgataatttccccatttttaagaaaaagaattcataggcttagcatgtggttgatttaagcctaacttttgactgattctatatgggattctgactctctgattaactttgatgttctaactttacctagcgaatattttttttctttattttatcgaacagggaagaggtcttttgatttttggattatttggtataatattatattcttgaaatcatcctgtgactgtcaaaaagctgactgtaaatgaacagtgagccactgcagacagaaacaattattcagggaaacataaattcataatcactgggcctaaaatgaattagtgagtaatccaatctgggggtgagaaatgagcccttggcaacattgtttttaggctacagatggtccttgaaacactattagccggtggatctgagcacctgaaaggtttaaggaagcctgggtctgtgctgaaggtgtctttgggtaaactgtcatatttgcatgcagcatccttttagaatatcaatgagatctttatatgcatgtgttatgtcatttccaagcaccctgtcagtaaatggatgggtggcatcagcccgaatgcaaaggaaaggggttcatctggaactgaaatagcagaaagggagcaggagatggatatttgatggctgcccttccctgtgcattgtgtgaataccactaggtgatcatctcagggcacctgcacaggcatctgaaatgcagtgtagaggctctgcttggcagatttgaggacattaaggctcagataagataactatcttggcccagatcacatacgtgggacatggcagagccaggattcaaattcaattttgaataattccaaagccaatgcagcacctgaatgcgtaggtttaataaaattcagcctaatccttctgaaagttaattcaatgcaggagtgactttagcatcaatattaatttaattttctttcttataagttatttcaagtttgctgtttccctacagtttgaattgaactttttcttcgattgctgggcaaatctcatttatgagtttgcagatgggagaggtattctttaagtcagctttgcaattaaaatgaactagagtacaaatgtctcaatttaaccttgacacctgatgtaatattcacacggcctcatcatccatcatcttttgtgtgccactgaggtgcattgggccactggcttttatcccatgattgtagagttgcatccgacattatctgtttcaaggatcgcagaccagctactttttctgaactagaattctctttgttctagacctgttgtttgggtgatatatagagatgaagcaatcttcgacctgattactgtctggctatagaactttattgtatcccatagtatacaggactgctttgagttttgcctctattctagccatttgctgagaagaaagacatttgtggaggtctcctcaataggaatttttattaaccataagtgatttaaaaccattgtcaaacctgtaacttttaagagttactgtgacagaatgaggggaaaatattctgaagtttaattagaaactatagaaattagacggccaggcatggtggctcacgcctgtaatcccagcactttgggaggccgaggtgggtggattgcttgaactcaggagtttgagaccagcctgggcaacatgatggaaccccgtctctacaaaaaatacaaaaattaggctagtgtggtggcaggcgcctgtaatcccagctcctcgggagcctgaggtgggaggatggcctgagtctgggagggcaacagagccagaccttgtctcacaaaaacaaacaaacaaaaactgaagaaattagaagatgaataatggctgtggtaatttactttcttgtaagtaaaggtctttacctactttacaagaaagatctttacttacaataaaataagttacctgtaaatggccttaaatattgattaggttgtaagagagaatatgaaattagataaaatgtagcaatatttgatgtcatcatttccttcctcacccacgcctcttctggagtgggcagttggtcacatgatcttgcccctcttcagcgattgcactgtggctgttactgtcaggagatgcccgtttgtaggtctgctggtagaagtctgagatagactggctcagagacaagctgtaccagtaagaacgccctaagaaactgttcaagccagagagagcagttgccagcgggcagtggttactggagctggaatgccagatgaagtctgatgggtttggctctgatgggtcttgtgcatccaaaaccaggtagccagaaggagccagttgatcaagcagatatagaaagatccccagagagaagcagaggtatcatccaagagatgtgaaagatttttccgcatcccaattgctacctggattcctgagacttggttttcattttcttctgtgaatctagtgaccatatacctttttccttgcggtaacatgggacataactgattttcttgaatgcgagagagctttaactaaaagaagattgacatttaagacaaaatgaaatattgcaaatagtcaagaagatctacacttgggtccagaatgttatagaattaagaaaataactttctgtggcatcagagattgaaaaaaaaaaagccgtcgagaccaggagcagtgtggctgtgaatccttccagagcccagatgtacaaggcagcagaagcaacaaaggctgtggccagcaacgaaggcagagtccccggtaggcggaggtccccgtgcacagtgtggtgcagcagtgaacccaagattttccttcacagggcaggggaactatttcctaataagcattggcattcaggttagtaaccagttgataggattatatcaacctgtctctaagtcaaaacagattattcaacttttttgagtggtattttagaatacataggtcaaaggtgggcatggtggcacacacctgtagtcccagctacttgggaggctgaggagggaggcgtgcctgagctcaggagttcaagtcagcctgggtaacatagggagatcctgtctctaaaaataaatattaaaaaagaacatgtagatcagaatttggatgacttttttttcctcaggtgcagagatggtaggggcatactttcaatccctggtacatgactttctttctggtctgcttagcaatatgtgtgaaatgtggccaaggatatgggacttgttgtgcctgtgccatataagagcctcatccaaataagtctgtacctctgtcttaaattccagaaaccatggatgcatgtaacaagcatattgaataggttctgtaacccagagcttatttgtttttattattattattattttagaggtgggggtcttactatgttgctcaggctggacttgaactcctgggctcaaggaatcctcccgcctcagcctcctgggtagctagctgggactacagatgcacaccaccactcctgtctcagagcttgatttttaagccttatatatacttataataaaatatgttcataatatattttataaaatgaatatataaatatatatttataaaatgtatataaggcttaaaattttaacgttaagaatgctgtttctcttttttagtttctactggccaatggaaagaacatcaagggattgcaggccaaatttataaaatgtttacccagggcaatgctagtttactttcatgtattcaagtattgtcattgtataatttaggtatttatactccccgggaaggtgtttcttggaacattttaattattgaatcttaagaatattagtttttattaattcgtcatttatttgtttatttttattttttatttttttgagacctagtcttgctctgtcacccaggctggattgcagtggcacaatcttggctcactgcaacctatacttcccagttcaagtgattcttctgcctcagcctcccaagtagctgggactacaggcacctgccacaatgcccggctaattttttttgtgtgtgtgtgtatgtatgtgtatatatatatattagtagagatgatgtttcaccaagttggccaggctggtcttaaactcctgacctcaggtgatccacccacctcaggctcccaaagtgctgggataacaggcgtgagtcaccacgcccggccagaatattagtttttaaatgaatgattccaagctaagttttgctattggaaatataggagttaattatgacaattatcatttgatgttgtgggggctaaatgtgggtatttttggtgtttttccttttttttgttacatatgttaaactctgagtcttttgacaacaccaaaaggcattatgacaactgtatatacatttaactttgctttcagggagactagttcaaggtagtaaaacctcaaaatggatttgcaactgaattaaggttttctgagtagagataaggctgaggtagccaaaactacttctgctatctctttagaaaaagtacttttattcagtctgttcttaaaagaaataagtgtggttgttttcttttttaccataagcagaatgaaaacaaaattagaagtcattacttttttttgccccagcttactttttgttatggaggtaaaaattacataacataaaactaaccattaaaagtgaacaattcagtatatttagtacattcatgttttgcaaccaccacctctgtctagttccaaaacattttcattacccccaaattaaaatcctgtatccattaaacagtaactcaactctttcccctcaaaatcaccagtctgttttctgtctctatggatttacccactctgattatttcatgtaaatggaatcatacagtgtgtgctatggtttagatatggtttgtttgcctccaccgacacacacatgttgaaatttgaaccccagcatggcagtattgggaagtggagcctactggaaggtgtttgggttacgggagtggatccttcatgaatgtcttggtactgttctcccagtagtgagtgagttctcatttttaggagaatggattaattttcatgagaaaggattagttctcacgggagtcagttgttaactcccttaagacatcctttgcatttccctctttttgcacatatctgtttccactttgaccttctttcccactctccatctcatgttgtgatgcagcatgaaagcccttgtcagatgccagggacatgtccttgaactcctcagtctgcgaaactgtggcctagataagcctcttttttttttataaattacccagtcttagatattctttaatagcaatacaaaatggactaagacaatatgtgtaaccttttatgcctggctgctttcacttaacatctaatactgctttcttttgtgtttgatttttttttctagtgtacccttttgattcccttttcactgctttttctgtatactttttagttattttcttactgatttaccatgagtattacaattaatattgcaagtttatagcattctagtttgaaatggtgccagtgtagcttcaatagcatataagaaccctgctgctgtatagctctgttccccctttatgttatttttactaattttatctttgtatattgtattaatatagatttatagttattgttttgtgcacgagtcttttaaatcacctgggaaaaagaagtggtacaaccccaaaatacgtaaataatgaattttatgtttacctatggttacctttacctgtgattgttatttcttcatatagctttgagttcctatgaaatgtcctttcctctcagcctgaagtatttctctttagcatgtcttatagggcaggcctagctcctttagctactgtatatctgggaatgtcttcatttctcctttattttagtaattttgccaagcatagcatttttggttaagtttttttttctttcagctttttaaatattttaccccattgtattctgggctccaaggtttctgatgagaaattggcagttgattttattaaggattgcttgtgtataataagttgcctctttctttctgttttcaagattctctcttttgttattggcttttgatggtttgaatatagtatgtctcaacatagatctctttgagtttatcctacttggagtttgttgagctttgtggatatgtagattcatgtctttcatcaaatttgggagttttcagttataatttattcagatattctttctgcctctttatctctctgtttttcttttggaactcccatttgcatgtgttggtatgcttgatagtataccacaggtctctaaggctctgcttatttttcttcttttttctttctacttctcagtatgatttaacagtatataaaatatgcataggagtatcttcacatttgctgagtctttcttctgcctgctcacttctgctattgaacccctttagtgaattttttacttcagttaaacttttcaatttaagaatttctgtttgattcgtttttataatttctatctctttactgatattagctatttgcttatacattgctttctttatttcctctactttttttgtccatgtttccatttccatttaagacagttaatttaaagttgttgtctagtaagcccagtgtttgagcttcttggggaatagtttctgtcaatttatttttttcctatgaatgggacatacttttttgttttttggtatgccttgtaattttttttttgaaaactagttgttttgaatattgttatatggtatccctggaaatcagattctctcccctaaccacggtctattattgttgactcttgagggctgccatctgtttagtgatttttccaaaggttgcattctttactgtgtatcattactgaagcctctgttctgttgacatatggttactgacatttccattttgttatctcattggtcagccagttatgtgacagaggatttccttaaatgtctggaaccaaaaagaaaagaaaaaaacaaaacaccaaacatttttctagtctttgcagcttaattctgacctaagtcattccctcaatgctaaaccaggtcacccatgactctgccttagccttcacctcctgctgtgcagaacccacagatccaccagtggggcaaacctatggtcctctcaggtcttctccaagcatgtggcagtcctaggcatggatttttcaccctagcttccacagcgtatacattttttattccctctagaaacttccttcttagcctctgccttccctgctttttggtctgtcccttactagtttttattccctctagaaacttccttcttagcctccaccttccctgctttttggtctgtcttttgcttccccatccattgtccgaggcataggtagtgtgtgtcttgaaatctttcaacagatgccactgctgcctgaaatgccactgcagcccaagggagcaggaatgaaacaagtaccagcctctgtgcagcccctcagggaacagccaggcaggtcaaaatacatacctgcagtattttaagaataaggtttactttagctccctgataccagcaagccacactaggagggcaggccaccatccccatggctgccctatggtgctggggttagagcatggtgggcaagtgagagaaaagaccccagtgctttcttactcaaatccagctgcctttttcttcattcggcatattccttactatcataggtttttaattaactcctagagttctgaaaaagctggttgtgtcagtatttgttagcttacttattattttagttcagggaccacttgtttgagtgccctactccaccattttgtatgatgtgatttggtagttccttctgaaggaagatagtcccactgcatagaaatctaagtatgaatattttcaatgaaacatgctgttattcaggcagccttttctgcctgaggttattgaatcagacgttctgcagtctcttgccctggtgttgagccctgggagctggatggagtctgaggtgggttgttctcatcctcttcccccttgctgcaggttccctctctgaatttcctggcacaatgccctgctgtcttaaatgtttactaatatttgctaaaaaaatgattatttcagtttagctatataaggtgaaaatggtttcccattttcagaagactggtttaccaccttttggctggcacacctgtatagctaacataaatgtgatttaaaatttaaatgaatttgcggagcctgaaagagcctcttctttgactaccctggagaaaaacaggtagcaacactttatgtcttagatgatgttcctcctgatgccttaattagaaacttgtagatttacttgcagtccagctatgtgctcatttgcacagtttagtctaaaggctttacctagagtcacaacttgattgttgtccaactcacactgggccactaacactgcaagcttgacctatatgtgaaatcatggagctggttcctcatcaatttcatgactgaaaagtttgtttacttcctttcttcttgttggcagttctgttaagtgtcttgcttcagctgtgtctgcagcctctggacaggtatagtggagcagtgttgcgggaagtcagggaccccaaacggagggaccggctgaagccatggcagaagaacgtggattgtgaaaatttcatggacatttattagttccccaaattaatacttttatagtttcttatgcctgtctttattgcaatctctaaacataaattgttaagatttcatggacacttatcacttccctagtcaatactcttgtgatttcctatgcctgtctttactttagtctctcaatcctgtcagctgaggaggatgtatatcgcctcaggaccctgtaataattgcattaactgtacaaattgtacagcatgtgtgtttgagcagtatgaaatctgggcaccttgaaaaaagaacaggataacagcaattgttcagggaataagagagataaccttaaactctgaccgccggtgagccaggcggaacagagccatatttctcttctttcaaaagcaaatgggagaaatatcgctgaattctttttctcagcatgggatatccctgagaaagagaatgtgtacctggaggtaggtctctaaactggcccccctgggtgtggtcgtctcttatggtcgagactgcagaggtgagatagactccagtctcccatagcgctcccaggcttattaggaagaggaaattcccacctaataaattttggtcagaccggttgatctcaaaaccctgtctcctgataagatgttatcaatgacaacggtggccaaaacttcattagcaattttaattttgcctcggtcctgtggtcctgtgatctcgccctgcctccacttgccttgtgatagtctattaccttgtaaagtacttgatgtctgtgacccacacctattcacacactccctccccttttgaaactccctaataaaaacttgccggtttttgcagcttgtggggtatcacgggacctaccgacgtgtgatgtctcccccggatgcccggctttaaagtttctctcttttgtactctgtccctttatttctcaagctggccaacacttaaggaaaatagaaaagaacctacatgaatatcggggcaggttccccaatagagcagcgtactattttgctcagtgggggacactgtaggtcatagagtccatcttggatgggtatcaacttgaagttagtgtctgcctgcctgcctgtctctcatatgtttgttcggggggcctatctgtatatatacttttgtcttatttgaagattccagtttttttcatagagaggcagtaaaagatgcccaaggatgttctgactccctttcaacttatccttgtaaggcaccatagagaaggtatcttaggtcttttgttttttcagactgtggcatcatcagcttttctccaaagtgctggctgcctctcacaacatcactgcagtgtgtgttgtcttgctggcagagtctttccatttctctttggggtgggaatggaggcaggaagatattcttttctagcacatttggcaaggggagttcaattcaaaactctaaggaattggtttttcaaatctgtgccacctttgttctttttttaaaaaaaggacatttaatatttctcaagtgcaaacttctcattctggctgctatttattttcttcattctctaaatttattctgtcagcgtttctgaagctgcctctgctggttgccaggcagtggctttactccttttggagtaaagatgaatctgaccccagggtaggatcaaaatctgtaccagtaggtcccagttctggctttttgagctaatatagtcaatctaatttcccttgcatgtgatagctattaaaacattttaagactgtgaacatgcttatttgagaccggaagagactgggtcacagaggaagaaggaggcaattacagagtgggagtgggcaggctttggtggtttggagactttgggagacatgaataatataagggattggtggaaaagagggagggagcagggtagagacaagaacctttggtcagcttgtattttttagggtcagtattctctggcaataatctctccagcttctttggaacgaaaacatgaatagtgtattagattaaaaatcacaggactcccaggctagcattaattctccattcaaccctgcctctttcctaccatgatggacaaggcaaggagatgagggacagaatgctttctcctccgcctctcactgttcctgtgattttcagattgtactattagcagagttctgcagacactataacagcgaatactgatgatcttctataaatgtatgtggaattctatttgatgattcttgtttaacgccacagaaattttggataggatacaagaagattacccatgatgtggcaaatgagaccagttgggatagctacaaagcagagactctgacttctgtatactgcacaggaaatggattctcctaactgtcctcctgtcatgtatgataccaatgtaattatagaaatagaagtcaaacatattttaacaaatgtggtactggaaaatcatacagctctactggctaattttccttaatttcatgatgttttacaaattggcatttattgctccctgtctacgctgactcgtttctctactaagcttgcttttttcctaccccagacacagatctgatcataatcttccatatatcccacccaaacagctattggtgcgtaggaaaaatggtttaggctgataaagaatgattcacggcaatggaaagaaagccagccactgaagtaacttataaaatgagtccagtaattcagatgtatttataattttatttgcctgtgtggtcctagttagacttggctctgcacagggaaaggaggggaaaaagaaacaattttaggggaaaaagtgaaagatggtacaaaaatttggtgaaaattacatagtccatatgccgctttgtcatcattaagctaatgttttcaacaagctgttttttgtggttcagcagaggaaactcggcagtgtgattgcagtcatggaatcctacctggctttggttccaccatggctacatcctgccataaacggagacttcgggaaggtctaggaaatattgtggtgttagtgtctttagttaaaagccaaccattcaaggttgtctggcccaaagtaacgtttccacacttagagaagccacccaacctctgcccctgtttaggctagtgtgaacaaattcatcctggccatgttgtcttctcagaactcctatgagggtccagatgtgtccccccccgaaaactaaatctataaggacctttggctcttttagctgctttattttttgttttcaaccatgtatgaaagtgagtgtgcaaaataggcttttcaataaattatgcatccttcaataatatatcgtttccattccagttagctttaggcccccaaaccagatcattaggtctctggaattggctgaggcaagctggcttttatgtctctgatgcctcttggcccatccttttcaccaagagaggattagaatggattcattgcaagggctgcagggaagtggtgtatttagtgctttgcagtgcctgccacagacttgagtgtcaaattcctcctttctctaaagagcataaaattcccatcagacttggagagctaaatgcaattgaaacattgaggggaagagtgttccttggcacattttccccacccggagatcctcaacagtacgtttcctcccgtgtagtgactattaggagtgcaaaacctgaatactttttcaaaattagaatgaccacaatagtaaataggacagaatgggagtggtattgaagtaagaatttgcttatagaattaaaccaaatccaaattatttctcactcgccttcaaaagataattttgagcttttgaacatagcagatttgctggtcgtgctactgagtagtttgaaagcaaatttcagtcaccaaaaggacgtaagtctagaaggaccctttacttctttctgttgtctgttttaatgggtgcattctggaaccaaatgcgagtcatcctgttttatctttttccctttgcccctaagtttcagttgcttgtctgagtgtacagctagattgtttgccttttgtaaaggtgagcatatgaagcagacatggtggagccttggggccctagtagtgcagaatttttggaatggcagcaatgttacctctatagtgtcagctttgttctttggatttgcattgcatgacccgtaataccaggtggaggaaaccatgttgaatttctctgggggccactgctcagcagttgtcaatctttaagtgcttaaaaatgtctagcattcttcctttccagagggcatcctgtgtttacacatttacgccgtcaaaatcaagcctagtggatagaggagttgtagaacagggcagacagaatcaaatcaggcctggtgtagaggtgtaccttgggaaatacctccagttgttttcagacacttgcaaatatgtgtaaatgataagttttatcagatagctttttattttaatattttgggaaatgggataacacaaccttttcttgtgaatatcttttgttcttttaatagaatgtgaaatcattacactctaagtagcaagacaagaatatcatgtaaacatgttctggaagatctgggctttaattttgttgtgattagtgtatttcagagagtgaacatgtttggaagagtattgaaaatactctcctgggttgtgctggtgttcatgggttggacaagctcacctttgacaggcaggcttggatgctgctgatggagttacagagagggctttgcatgtgaaaaaatgacattttaagttgaaatgccataattaatcatttccccctttgattcatgttatagaaaccaaattaacataattaaattatttttacaatcatatattaatagaaatgaaaaatactcaaggtattggagaccccaaatatcctgacttgatccttattctatacatgtcaaaaatacttacatgtaacccataagcgtgtaaaatattgtatcttaataaaagaaaaaaaaatgtatatgtatattttaagaatcagtagtgccttgaaggataaatattctaataggtaggcagtggttaactgcaagtgatctgattggtggtctggatcagaaaattggaatttcaaattagagaatatgtttctgacttgacatcataagcatagatgtctttaaaatgcttttaatattcacaggcatttggggaagaatgagctagattcttttttccctcatctagcttagatatttctacatttgctatcctcagtacatcatatctcagtagctcttcccccggcttgagttgtcctggaaaggtgcagacctcatgagaggtggaggatggcagggaaataaccaggtcatctcaggggtctgcagaagggtaacatctaattgagttctgagaccacacgtgaactctgcctcaggacattgcagcccttgtcctggccacacactttattgcatgtgagtgccccacactacccaaccagctcaaccagcttcactctgcctcacgagaaagctcttattttacctgtgccaaagtaaaaaaggttgaagtttgccaagtggaaaggaaaagacagacaacacattaagtgattttttaaaaaaaatttttatatattccttctggaaactgtttttctgtttgacttgatgaaagtatacatgtatacttgtatacatgttgtagaaaactataacagagaatacaggccagtattctctgtagtcgattaaaatctcttattggtagagttattcaatagggaactcccaatttgacaagttaaaactcctaaacaaaaaggtgtcttatgttttgtagtcttgctcttttgaagggatttaggaaacctctaacttctttttttgtttttcttttcctagtgcctttgttattgggaagaggaatttttattttcttttccagaggaagggaaatctctgggccagatcattgcctgggacaggattctcttgctaaatgccctgcacaccatcttccatcctactgcagcagactcaccttttaaaaactcttctattgtggcatcagcttagtctagaagtctgctgcccactatggtctctgctagccacatggggctgtttaaactcaaattaattaatgttaaataaaatcaaggttttagttcctcagatgcactcaccacatttcaagtgttcagtaggcacctgtggacagtccagaacatttcgagcatcatagaaagttttattggacaacattgattagatccataatggttttcaatttctttaagactttaaatgtgaactctttagcctggcctgtaaacctgcccaaattttgccatctgtagatattgaatataatttaccagaagggagaatgcagaaggtagtcaagaaaatccatgttggtataactcatgtgagacccgggtggtggtggagagacatttaattcccttctgaagaaggcatggcacttggacagacaggaggtagtccaggtagctctgggataatgtgtgaacatgaagattaatttgaggagtatagaagattttgatcttggtgaagggtaaggtgaatagaggacaacgggagagagataggtggcctgtattctctgttatagttttctataggggactgtcttctcatggtcttcagcctgtgtttgaattcaaacatttcagtctcctttgtcctcaaaaagagaacatgaaggagtggattcactcatggcaaagcagatgggaacaggggtgttagtgaatagtgtggacttcagactttaaggaatgatgatgagagttagtggtccacagattctggaaggagcactgtggtgatctggtgcgaatgagagggggtgggggatattacagagggttatgaggcaagtaatacctttacagaaagtcaaattttaatgatggaaagaatgcaggaatgtaagaactttaagatgaacagaacatgactcatgatagctcagacgacccagaagatagagtggataagtaatagaggtgcaggtggttcttgatgacaagaacttggccttcaactctgtgtccctagcacctgtcaaggcacttgatgattaatggattctgttaaacacttgttgcctctgtggggaaagctgggctcaccaagctagtagttgtggagtatgggggaaaacagagttctgtgtctcaggcggtaatttcagcaacaagtgaagaaggcagataataggctggggagaagggtagaggcacttagtgacaggctggcagcaggtggaggatatggccgggagtattgctgagtttataggattaaaaggccccactggagagctgctgagttgattgaattccctagaccccagatgccaaggtaaatgccactggggcagctctagcacttttcaatagtgctgcctgtggccctgagagtgtgccagcaggtggggttcttctgaggcaggagggcaggactggtggagtcaagcagagggagccagctctgcaacacagctcctgggtggcagcttgccttccagcacacgtgttatgcagcagagacctggtaaagccttgtttggaaagacaactttggcagcaggatagctggaaagccctaccttggaaattagtcctggggttgaattgtagctgtgccactcacttgctccgtgaccttgggcaagtcagttcacctctaaggcttcctcataaaatgaggagaataattcttaatctccctgtcactggaggctgctttgtggaggaaagcgatgtatgtgaaagcatgcagtaagctgtaacatgctacaaaaatgcaagttatttataagttgggtttcaggggcaaagaaagacaactcagtgaagatgtctttacagtaatcactgtgagttaatgacaacatgaatcaagaatatgataatggaaaaattagggagacaacagaaataaaggcttctagtaagaattttaaaattacacttggaaaccaggtaagcaatgggaggaaggcaataggatgaaggagaatgaaggctagtaaaagatagtaggattctgggtttgaatggttgagagaatggtggcaacattaacctagaggcagaaagagggaaatactggaaatcaagatgataggctttgttttggacttattaaattctctgtactactggaacatcctgataaaaaatggtaacaggacattctggttgtaagcacagtgaaaaaattgagactgagtttggaagccagccaccagaagcagtgtttgaggttttgcaacagaatgttatcacccaggcagccatgtagcattagaagaaggccagggataaactttggggcagataatgcgatttgacttccttgggtgttaggtcttcctcaaggtaagcgtagttttcttactgcttgtatggtggccatgacacttatgactgtcagcactacatgtttatgtgttcatatttttcacatactttcaattcttggagtttagggattgtattaatcttgtataccatagacacctgaacataagctaaatgtctactagcacacagtaaagatttgaatatgttattttgaaataatgaatcagtgccctaaaacaaaggtggtcattgttaaggatgatctggagaggcctgggtgaaggataccaccctgggcccattccaggttagtgacatgaagagaccagttgatattgtcagtgtctttctcctttgatgctctatagattgagttgagaacatagattgttgattgcggattaggaaaaataggaggtcaaggggattaagacagcatcagttttcatgaagttcaaggtagttggagaggtgggttaagctgaggaataccagtctagagtgattcacagtagcttctagaacaaaacacttttgcaaaacaagacaggtggaattaaagtgggggcagaaattgaacaggagagaaatttcatgctctacgttcttggtgtgaccgtgctaattgtgtggcttttgtgggttggatcgcatccttgaaaagatacgttgagttgttgagtcctaaacccccctgcacagtatcttagaatgtgacctggtttggaaatagaatcatggcagcttagttaagatgagttcataagttgaggctttcatgcaatgattgatgttcttctgaaagaagagatgcacacatatagggagatcaccatgcgatgatggaggctgagatggaagttagctgcagctgtgtactaaggaattggcagccagtcaccagaagtggggaagagactaggaaaagatccttcctacaggtttcagagggagtgtggctaccttgaattcagatttctagccccaggagctgtgagagagtacttttctgttgttttaagccacccagtttgtggtacttggttgttgcagccctgggaaactgacaccatggctcaagggaagcagaaatgaaggtcatggagaccagggtggtagaatcatggatgcaatgctgaaaatttggagaacaacatggagagatagagtgaagaaaacagaaggggaatgttctggagtgttctgtagccttcatagctaactgctcttgtcgtcctaaggctccttgtacgtcagtctctttgaaagcaaagtgagaggcttttgccattgccatcaaggtgccctctacaaccatgtttgtatttatctcagcggcccaggcttgtcagttcctggcatttgggtttaggttgtacttggtgtgggcgcttggtttcttttagagatattgtaaaagggacactgtatatttaaatagcatggaagacttcaggttgaattgggtcaaggtgcttcccactccctgcacaaaagaattctaattgcagacaactcaatcaaacaatacaactcagtatatttttctgaagagagggaaacaattggaattgaagtgactaattccttttgcaaggtcctctaggaaaactagaaattctagaatggctttctggagaaaagtctttgaagggtttggggaactgtttagaaaaaagaaagcaaagaaaaatctgggttcaaggaaacagacttgacaatattgaggttgtagggagtgtccagatacccggcatgcttgactgtctctccctctcccatgactccagtttggatatgatgaaaatgaatgtttttaatttgttagcctggagcttctcctgcattggaaagtgattttgggattaatgctaacgttttagaagatttttcccatattgagtgtagaattaaatgtttgcgtaccccatagtgtttactttaatttttccacactcttcaggagttggcaggtatataattctggatgatagcatgtgctgtgtgtactctccagtcctgacgctgcagggttagggcattggtgccttttgttcagtccacgcagggaaacgtgcaggcagggagctggtccgagacgtctccaggcagattacgggaatggctgctcccacaataacaaaaaatggctcctggtggaaaaagaaaaatagaggtagtctgaacttgtggacaggtttgtttcctccttcttagatatgagtatttaatttttctctttttagctccctctctctaccaaaacaaaacagacaactctttgaaaacacctccaaatgatttatgtgccaaagatgtgtgaaaatgatcatcttagatgttgttgggggtgggaaacaaccctcagtggtttgttccattcttatctgtccttgaaaatagttgagaacaaacgaagacttgggactgactgccttggatgtggtctggtttgccctgtaactgacaagagtgatgggtccccgtcgagtgacggcgttggactagaacccaggctgagagagcactgcggtccttggctgatgcactgaagaaaaacgcgtcagatagaaacaaaattactgtgtatccatttctgtgcataactatagtggaagaaaagcaaaatttaaaaaaaacacaccaaaaaccctgcgatcaccattctctgtaattcagactcttttttgtagtaagaagtgccatgcagctttcatgaagttgctggtatctgttagccgcactccattgccatggcccatcttcttgaccttccactcttattgtgggtttccctgttaatcggatcgtgcctcccccctcctctgcaaacaccttatagttttgagagatgataatcaggcataaaatccttcccctgagtctgagtctgggacttcagtcaccttccagcctaagaggctggagcagcctggcatgctccccggcagctgtttttcttagttggtgcattgctttaattggccacagttctcctcatctgtcatgaagactcttaaagctcatacgagagtaattttctccacctcctttattgcgagttttctcttgacggggcacaccactgactctctggaaggcttctctgctcgctttctccagaaagccgttatttgctgagtttctgcaggctggccgattgagttacagcccgaagaatgttgaacctggttctcagctgcaggatgtctttccccaaagttcttgtactgctaggcctaccctgaggattcacatatgtgtattggtttacaacaacattaaagcatcccctgaactccccaccccgcctgccccaggtgggtagattacttttaggactatgaagtagtgctctcacaggggttggagctcagggttggcctgcagtataagccagttcccttctggctggtttcacatacatttatggccttcttttacacctaataggcttgctttgggttttcaggaaaaaattcttcatgcaattagggagagattctgtggtcatttaccataaaaggttgaaagctttaataatgtaaaacataaaacaaccccggaaagtaagcattaattggatctctaagtattgcatttgataagatatacacagagagtgaaagatcataagcagaaaaatgacttgctgatattacaatttgaggttattttagtaatggtgtataggatgaaatagaccaggaaacaacttggaaggaggggcctcacgttagcacattgcccttagacattaagcctgtagcagctgcaacatccaaggtgaggttgtggttgagactgtagtgagcgatttgtatgcagttcctacatcaccactgtccctgtggactgcagttggtcctcttgcttgttagtgttctagacacataagtttcttaaaatgcgtgatttcgtagtagagtcttataattctactagattttgtgtgtagttttatgtgtgtggactaatacttctgtgggtttcagtctacacatttgtattttattcttgtcattagagttctgaaatgatggttggcacgaatgaattctcatctcaactgaagtgccaggatgcccttgctttcctttaaccagtagggagaggtaggagccgtgcggaattacaaatggtggcttctgtgaaagcctgttcaagtgttgttcagagtttcaacaacaacaagaaaatgctatccaagccatcatttccttttttttttttttattatgagtctctagtcattcttgattttgtggcaaattgatggtcaagaaggccaagtttagcctacagtggtgtcttgtttggactgcactgtgaatatcgttaggtgggggcaggcactttccagttggccacagtcctcactactcctaatgtcctggcatatcttttttacctgcctggtgcccttgggtcatttatttgcatggtacacaaacacaaagtacattttcatatttcttccttaaagagaatcaaatagtaaaggagatttctatttgatttctatttttatttgtttctccaactgtcttaagactgtgatataaaatgaacaatgagatgcttaaaaggtttgagaggaaacaaaatttctaacgaataagatataataaaaaggcttccgcccaggataacattattaaccagccagttagcccttgagtgtgtgacgttgatcttattgactgcgcttagcagagtgggaagtttgtatgtttcaggtttactgtgtgaacagtcctagtagtgaatgattctggtttaacctttttcagtcttactggaaatatttttgctcctgcgtttcctttattcctcaaatgttgctaaattaactcaggccttggaaagccctgaatagtcatctccatttcacatacttctcttattttttcaattggaagtgttgatctcaagacaagctgaaggctgagcctggttgcattgatctgattgattctgccgtgtgctctgctcggcctccatggaaagaccatatcgagttcgtccactgttgtgaatgaaaataatcagttggtgaaagcacaaaattagaaacctcttggtatatttatttctgtgtctcaagaattctgatttaaagcagactttattccaagtaatgtgaacagtaggtcgttcaggagtctcggatgaatcaatgttttcttccctcctctccaagaaaatctatttaaagcaaaggtcaaatctgtgctggatttagaacctattaaatgtaagtctggaaaacagagccacttctcttttttttgttcttcacatagtttcaagcactggggacactctggtcttctgcaaatcatcatttcccacgtattcctggtgtttgtaactttccttttgttccagaggatggagtgtaacctgtagtgtatatactgagtgaatttgagctcttttgagtcttgggcttattacatttagaaataatttaaaccttgaaagttgtcttggaggagtttattaggctttgaattatacctgagaagaatgtattaatgtatagattaatcaactcatttaaataacctgcttacaaattgactcctcctgcttgtggttcctccccaacccctcctatcctgtcgccctctggcctcctccatctctatgaaggctgataagccatagttggatgtgacagccttagacacagcccctgcccaggcctcacactcagttactgagcccagtcccctttgcttctgtaaaggcttcagtcctgctgctccctccgtccaggccgattagatatatgggtgttggcatagtctctgaactggactccctgtttcccatctttaccttttttatgtcattcttccattcggtaaagatttgaatatactttgcaagccaggctgtgccctcggccctgaatatacaattgtgaaagagtcagccaggaaatcctggcccctgcagctgattctctagtggggagggtggacagtgagcaaaatgtgtcagtaaaagatgtagaagacggacatggtacatgccccaagggaaataaaggaggaaagggaaataaggagtttgcatggggaagtgtaattttaaatgggggcattcaggagggcctccctaagaagccacattgaggtggggtgagctgcatggaaatctgggagaatggatgcaagggagcagcaggtcagcctattagaagaaaagcagaaagctagttggggctctggcaccagaggaggtcagaggggtgctgggcctcgctggccatcagaaggcacttggttcttattcagatggagaccagaagctttggaggactttgaatgtagtgacaggacctgccttccatggtaacagggtttctctgctgggtggaggcccagggacagttcaggaggctgctctgatggtccaggtgagggagggtgaccctagcagtggccaggtgagatatggtcagggtctagatgcatttcagaggcacaggtggcattgtttgctgattgattgaatatatggggtatgacagaaaggaagaagaatgattctgatatccttggtgtgagtacctggaagcatggagctgtcctggactgaaagagacagaagtgatcactgctgtgtttctctgggtggtgttccataactattccatgcagggccatgcaggcttgggagggagggaaccaggaactcagtttggggcatgctatatttgggatgcctgattggactactgtttgggatgagttttgtcctgttggaaatcagagagaatagggctcacaaggagcggatgcgtcacgggcctgaggggcaggaacatgatgcagtgctccaaggagacctctgtctccaaaccagaaacttatagctgccttggtcatctttattctgacttttaatggggaggtgggtccagaggaaaaaaacaagctgtacatgctcagtgacagtgacactcagtatcccagtatcagggaggcagtagacactgggaagcacctggccaagagcacgtgtgtttatttctcaggggtaacaagttcagtgggaacatgggctcagaactccctgacactgtaatgtttcaagagaagctagataacagagttttcttgtggaatctcttggcttttaaattttggcttaaaaatatttcttttaatgggatgaacagttaacctcttgtcaacctactggttgtatttcctggccactcaaattcgccatcaggaccttttgtgcactgaagtacaaactggtctacttccaccctcaggtaagtctcagtcttcttgactgcggctctgaatgcccaggattctgatggaatcctgcttcctaaaccctgcttggttttcatccacggctcttaacagctcatgacaccgcgttctgtttttatttgtgtagtgtctgtcccctcactaatgtgtaagcccattgagagctgggcctttggagttttgtgcacagctgtgttcctatagtcgatgtttcatgactgcttactgactgtatgaatggcccaccaagctaacatctcaaatactttccaaaatgtcatcagaaggcccttgtcacggccccaaagaagaagggagtcgtggagcagaggagagcacatggcccacagcggccatgagcagagtgctctggccggggtcaggagttcaggaggcagcagatagtccccaaacaaggggtggcaagcatttcttcagcacctgctgtttgctaggtgattggtttgtttgcttttttcacccagtgggagcagtaaggaaatgacccaggtgatctctttttccattcttcagccaacattgattgaaaggttatatgatccacaaagagcaagtgacagctgccggatgttcatttgaaatttacagacactaatgggggcatagtggtggaagtgactctcatcaggctgtccaggcacagcagtgtccctagagagcagctctcagtgttccagggcctagagaagcttcctgatcccccaccatcccagcaggccttcccactgccatcgaggggagcagtaggcagctcttaaacgaaagagccagctctctctccatggcgttgatattcagtgacttctgatctgcggtcacttggtccccacccctccccagttccttacttgttgctttcttagagattggctcctttttctgctggccacatgcctattacttattcccatttcctctctggtcctctcaccattcaccgagcactgtttattctttttagtaaatacacttcctggttttgtctgttatcacaggcagaggtgataccacaggcagaggttaggctcccagcattctaagcctccttaactggctgggtccttgttccagtccatcttccatactgtggtgggtgatctacaaataaaaattcaagtatgctatttctatccatacaaaccttcacaagctccctgtagactctgggatgaagtccaagtgcttcctcccagcctgccagagtccccaccctccagcaccttcctgacacgagactgtggctcaccatactttacaggcctgggatactcactgccccaacagccagacatgcggtgatactttggctgttttcgtgctgttgtgtggctgttttgtgctgttgtgtcgctgtttcattctgaaactcttgggcctctaggatcctgtgcacattataggcctttcctgcctaagagttaattacaggattttgtttcttgctctgtatttcagtgttaacatctgtctccatgaccttccctccttgccagtctgtgtaaaataaagaatggtgaggagagccccaacctgccccaaagcccaccctcacgcaccctagttcgttacgggttctacacagccggaagcctttcggccaggtgtgtgtgtcagggagaagataagacttcttcctcactgtatctgcagtgctgaggccaccgtggaaatgagatgttttctacattttttgcttatttttttcacttactgatttttaaagtttatgtataatagagtgcgcctctgccattaccaactggagactctcatgtagaaagtatttccaattttaaatgtggtaacggtgtcctatgtgagcatgagatattttcctgatatagcagaggatttgtagacagctgttcttttctctcatataactctgtctgtactccccagcgcctgctgattcagggagccctaagaaggtcctgctggcagggctttcaagaaccacgccctgtgggctaacctgcagcctgggagcctgtgggggacagcccagcttcggccctttctgtctggtgcctttgcttcagcaggttccaaatgtgagcctgtgctcccattttcgtcctatggctatgatcttcactgccagtttgcacagcctgcagctgccacacatgcatttagaatatttttaaatgatcttccttcactatttctctttcagaaatttgtcactgttttcatttgctgtttgcacaagactaaatacagcctgggcacattataatttttgctaagagtcaaagggactttagagacagtaagtgtggtggctgtgtcttcaaaatattgaagttttaagtttaaatctccaagtagtcaggtaagttaaataattaagttgagattaccatgttcattttcttatacagcatctgtgaggtttgctttaaaagttttagcacgtgttttaagaaactggttttgtcttaaagcagataagtagttcaaaaattgtaatgactataccgcttatgtgctgcctatgctgacagaacatatattaacatttgtcgctgtaagccaaataaagatcttaatgagattaataaccctttatcttcctttggtaaaatttacctgatatacttaatgacatagttcattaaaaacgctctttgtaaacttaagttgtctagaaaataatttatctggtagtttcatttttcatttgtaaatgtaatctccattgtgctcagtttgggccctttataatttttccaattatcaaggggactttagaaatagtaagcagaatagctatatcattatttgttaaagttgaaaatgttaatccccaaaggtcgggcaattaagctaaggttattatgttcatagtaaaactattcctagttggagtgatgatattaaatgtggcattgattcattgtgtccctcaagtacacagtgacttctagagatccactctgggcaaatggtgtgacaagcaactgttccgtgggattatggaggtcattttatacatagctgagtggtggcttgcaaatgctgatttcacattcttcttgtaggaagatcacactttgaaataattttcttttaggaaaaaaaaacatctattttgaggagaattccatgttttaaaaaattacaaaaagaatccacagtcaagtagtaaatgcttcttaaaacatatacattatttttgagagatttaacagtattcaagaatctgtttgtttagcaaataaaaggattcctggtactaaaataaaaatctagtttgggggaaaaataaattaagcatattagggttgctatttaatatcttttgagaaatgaaaacagtaaatattttcagagtttttttttttttaacctcgatttgagccctgtcacaactgttagtcaaattttctttcagtaaatagtagtaattaatagtgttcagactttctgggctactggagcctgagtgcataaatagtgctctttcttacaaatgatacttgatcattaacagcatggccagttttatcttatgcatctcacttcctaaatctgtcctctaacactgcatgggatgctttttcaggaaaacgtgggtttttaagaaatttgtgacttttttttttttgaaaggaagaaactaaaattagagtatctcagctaccctgcaagagagcttcttagacaaggcaagcccatgcacacacagtgtgtccctggtattcttgaatgatcccacggtgtatgtcttgaaatctcagcaaacagaaattcagttcattcattaagcattagaaggtcttcaacacaccattggttatttgggaaatgcaaattaaaactactaaatctaatactacgcacccactggaaggctaaaattaaggagactgagcatgcaggtgtttgtgagcatgaagaatagtggcagagctcacctgtgagctcacctgggaacccacagtgactcaggcactttggaaaacagtcttacagtttctggaaggttaaacatgcacttgctctgtttgtgcctgtatgtgtggtatgactgggtaactccaatcttagatttctacctaagagtaatataaacgtaagtctacacagagaccagtcacacagattcatagaagaattattcataatatcctcaaagtggaaacaatccaaatgtccaataataggtgaacacctaaacaaattgtgctgtgttcatacattggaatactgcttggcaacagaaataataaagtattgacatgtgcattaatattagatgaatctgaaagcatcaggctaggtgaataggccaaacagaagagactgcaaactatgattctgtttatataacattctagaagaggccaaactgtagtaaaaagaggtagatgaaaggtcagcagggcctggagtgagggaagggacttgtctgcagcatggaaggagggaactttggggatgatgaaagtgttctgtatcttgattgtggccggggttacctgactctatacctttggcaaaacttgctgctgaatcctacgcttaaaatgggtcagctttattgtatgtcagttaataaagctgattaacaaaagagtatttctgtagaggcttacatgctagtgtgaatgtgtgaattcaataaattgggttggcttattctgagaaggataaaagttttttgtttttcgttttttggaaatagaaacattttgtgggaggtagggatggccagtgtagagaaatatgtcatggggtaagtgggaaaagataacctgagggtaccagactggcacctgggtgcttgcaggtgagaagccaaacatctcttgaaaatgtttgcttaatgcctgtgagatatcatcctgtcttcctttgaattattagtattataggtagtccttgaaatgttatacatttaacagaaatttctcttatctacttatggactttaaatttagggatattcctagattggaagaaggcaatattcagagcaaaaaggtacaagctttacttgccaccagcagctgccagagtggaggccttatgtaattacttcggcttcagccttggcagcttttgttagcccaaagtggatttgctatatttgtgctttgaattttaccgtttacactcattaagttctataaatacaaaagcatggagagcattagtgctgtcaagaaagaggtgtgattatgttggaaatgaacatgatagtaaaaagaatatgaaagtggcagggaaatggtgactgcagctgcactgggtgtgagaggctgggcagggaacgatctgaagaatgggggagggcgatggtgagaaaagacacagctgatggtcgacaggggacaggagaaagagattcacggaggggaagaaaaagcattgaatgtgtgggataaagaaagagcattatcattagctactcactagcccaattaatgcaggagaagggagtctgctctggaactcgaaggctaagcatggtgtggttgaagtgctgctagtgaaacctgaaccatctgctttgggcatggtcagctctgagcccactggaatttgcaggacatcaaagtgagggctgcagcagctgctgctccatggcatctaggaaatccctcgtggccctgccgagctgacggaggaagagggctcctacccgtgcagatttcagtggtgctggaaccattcatttttgaagagagactcttgccatctgcaaatcggtagaaatgcatccaggttctagaagttttcatctctcctggcttgtttattaactccaaagtgattaacagtggaaccaccttttgaatcctgggtactcctaggttgagcagggctgcacttccaccgtctttcagggttcaccagatgaaactctgaggatgctctatgaatcagcagatacacaacatctcctgagattataaggtggtactgtctgtggtgattacttaattttaatttataaactgggaatgcaaaggccatgctgaccttgctaagaaatgtgaagttcacaggagaacaaaactggggaaaaaggtaggggacagtcgtcagtagcagtcactcactttcgacattaaattatgcgtttgtttaattgtgaaggaaaatacaattgtagaacatgcaccaaaagctagaaatatacagtttaatgttaacacctaaaagcaaaatactaattaaagattttggaatattttttatctttctgggtatgaaacctccagccctgactttttatgccccttataacagctaagtccattgtaactttcagtaattggctttttattaaaataagagactgtagtataaattttagcaactggactaaataggcattaactggccctgggatccaaccataatttgtaacatcgttcctctgggaaaatggattctaagtgcccaataactaccttacaaatagactcttgaatcatagtccatttgagaataaggaactgtttgtgatagtaataccttcaattggctcgcttgagaactgcacagaagggacctatgttccaccacatgtgtgtggtgaacccagctcgtctgggtttgatcaaagattattgctgagtgggcatggaaagtgcaggaattaaactcaaagtagaggctggagacacgtcaagggtggcgttagaaggatggacctggagggctcttagtggtaggaagaggatttcaatcccagaggcaaaggagtgtatctgagcagatgaagggcagggagaagagaatggaagagtaagcaggattgagattgagaaccagccattttcaagcaaaatgtaactcaaagtgtaccagtaaggctgaatagcccaccaagaggtcagagagagacatccctcagatctctctgctctctctctctctctctgttttatttatttttattttatttatttattttgtctgtcacccaggttggagtgcagtggcacgatcttggctcactgcaacctctgcctcccaggttcaagtgattctcccacctcagcctcccaagtagttggaaatacaagggtgtgccaccacacttttctaatttttgggtttttgttgttgttgtctggagatggagtcttgctctgttgcccatttggaatgcagtggcacgatcttgactcactgcaacctctacctcctgggttcaagtaattctcctgcctcagcctcccaagtggctgggattacaggcgtgcaccaccacgcacatctaatttttttgtattttttgtatttttagtagagactgggttttaccacattggccaagctagtccctctcctcctcctgccaaggaagaagaaccatgtattggcatccagtctatcctcatgtgtgctgcagaaataaccctaactggagaaagctgccttcctaagatgagcacctatgtctccatttatgctgtgccctcttacaaaaagccacaggcaatgggctccacatttcagagatttttattcctcactctttccctccttggatccacgcataagtccagtggggaggcccatgggacttggcactgagctagactgggcctctactgtagcacctggatgctctccctgggccaaatctgtgtaccttgtctcatctctttggtgacgtgcttctcaagaggtttttctgtccttcatacactgacccccggcaggcacccctctagaatttcccagacttacctgaatttcctggtgaacacacccaggctgccaagctggcatttccccaggtcagggtaatttttttctctctacccaaattctaaagggcaggctgttgttttagataaggaaggcatagatgttttcaggatgcttgtttgagattcagaattacaaagctaattgacaataaaaagtataaagtttatttattttagagacaggctgttgctggactgcagtggcatgattatagctcactaaagcctccaattcctgggttcaagcgatctttgcacctcacccttctgagtagctgggactacaggcatgcaccatcatgcctggccaattatgtgcctatatgtccctttttttctagggacagagtctcactctgttgtttaggctggtcttgaactcctggcctcaggtgatcctccctctttggcaaaagtgctgggattacaggcatgagccaccatgactggcttctttgtttttaataaaagtccatttaacttttatgcatagaacattattctattaatgtttcgtctattgcaggcatacctcagagatattgcagatttgggaccagtccatagcaataaagcaaatactgtaataaagcaagtcacactatcttttttttttttttggttttccagtgcatataaaagttatgtttacacggtactgtactctattaagtgtgcaacagcatcacatctttaaaaaacccaatgtgtgtgccttaatttaaaaatactttttactaaaatacactaacaatcgcctaagccttcagcaagtcataatctttttgttggtggagggtcttgccatgacattcatggctgctggctgatcaaggtggtggttgctgaaggttggggtggttttggcaatttctcaaaataagacaacaataaagtttgctgcatctgttgactctacttttcacaaaagatttatccatggcatgtgatgctgtttgatagcatttacccacagtagaacttccttcaaaattggaatcaattatcccaaacactgctgctgctttatcaactaagtttatgtcatgttctaaatcctttgttgtcatttcaagaatgttcacggcgtgttcaccaggtgtagattccacctcaagaaaccactttctttgcccatccataagaagcaactcctcgtttattcaagtttgatcatgagattgcagcacattgtcgcatcttcaggcttcacttctaattctagttctcccgttgcttctaccacatcttcagttacttcctccactgaagtctcaaacttttcaaagttatgcatggggttgaaatcaacttcttccaaactcctcttcatgttgatcttttgacctcctcccatgaatcataggtgttcttagtgacatctaaaatggtgaatccttgctgaaggttttcaatttactttgcccagacccatcagaggaattgctgtctatggtagtatgaaatctatttcttaaataataagacttaaactctaaatgactccttgatccatgggctgcagaatggatattagataaacatgcatgaaaacaacattcattcatcaacgatgtctctatcagagctttgggtggcccagtgcattgttagtgagcagtaatattttgaaaggagtcttttgttctgagcagtaggtcttaacagtgggcttaatgttcggtaaaccattctataaacagatgtggtgttagccaggctttgtttttccatttctaagaattgatttagcataaattttcagaacggtaaatgagcattggcttcaacttcaagtcaccaacttcattagcctctaacaagagtcagcctatcctttgacactttaaagcttgggattgacttctcctctctagctatgaaaatcctagatggcatcttcttttaatagacggctgtttcatctacattgaaaatctgttattcagtgaagccaccttcatcaattatcttagctagaccttctggcgaacttgctgcagcttcctcgtcagcgcttactgcctcacctggcacttttatgttatggagacagctccttttttaaacctcataaaccaatatctgctaaggctcagacttaacacagctccctcacctctctcagccttcacagaattgaaaagagttagggtcttgctctggattaggctttgatttaagggaatgttgtggttccagaccactttctccataccagcaataaggcagttttgctttcttatcatttgtgtgtttactggagtagctcttttaatttccttcaagaacttttcctatgcattcacgacttggctaactggtgcaagaggcctagcttttggcctatcttcttttgacatggtgcaccatgcttttgacatggtgtaccaaaacaatttcaatagtaacatcaaaggtcactgatgacagattaccataacagatataatcatgagaaagaagtttaaaatattgcaagaattaccaaaatgtgacacagaggcacgaagtgagccggtgctgttggataaatggtgctgatcgacttgcttgactcagggttgctagaaatcttcaatttgtaagaaatgcaattgtctttgaagcacaataaagtgaagcacaataaaatgaggtgtgcctgtattacattaacaaagaaggcattgctaatgatggcatgtattcactgcctgaagtagaagagatgtgtattttccttgatagggaaaattcttttgttgttgttgttgttgttgttgtttttgagacggagcctcactctgtcatccaagctggaatgcagtggtgcaatctcggctcactgcaacctccacctcccaggttcaattgattctcctgcctcagactcctgagtagctgggattacaggtgcgtgccaccacagcccgactaatttttgtatttttagtacagatgggttttcgtcatgttggccaggctagtcttgaattcttgacctcaagtgatccacctgcctcggcctcccagagtgctgggattataggcgtgagccactgcacctggcccagataggggaaattcttgatgaataaatagtaagaggaagaagaatgggttttactgagtgtttgctgtatgccaagccccgtgctaaataatttacgttgattagtttatttgttcataagaaaagtgctatgaagtttttagctcctttttacacataagaaaatggcaatttaaagaggctaagtgtcttgctgaaggtcacagaggtaacaagtagagagcttggactagaacccaggtcatctgaccacaatgcagggctctagactacatctttcttaaataaatctttatgaaattgtcaaaagtcactttttgagaataaacactgaacaataagacagttttctggaacctgtttctcactttttaatagtagctgatcctcaattttactagaggtagaaggattcttgttaattaaacatatttctttaagattgcaatttaccttatcatataataaattgcatatgaatgttacttaatagtcgtcttccagacagaataatttcagcagaattctgtgcttcccaattaacttaaaccatattttttatgagcccaaaattacattcttatatttgagtgagatatcctgttcatagtcataaattcactgtgaaaacaggaacgtctgttttttttttttttttaaagaaacagggtctcactgtgttgtccagtctggagtggtgtgctcagtgttcactacagcgtcaactttccaggatcaagcgatcctcccacctcagcctccagagtagctgcgactacagacatgcagcagacacgcaccaccatgcctggataattttttagttttttcgtagagatggggtttctctatgttactgaggctggtcttgaactcctgggctcaagcagtccctcctgtctcggcctcctaaagtgctgggattacaggcgtgaaccaccgtgcccagcccactttttttttaaatctaaaaaatgttattgtgctttaattccatgtgataatggacattacaccaagatgcttttaaggctggtagtagtgttttggtaggtgttggcagtttaacttgattagatactttctataacatgggaaaaatgatcagcttatttcttacgctggcaatgcatggagagaatggtttaatctgaagatctcagcaggattcaaaattaatattttgtcatatttttatcttttggatgctttaaagattatcttatgcaaactgagaaatgatagtgtttgccattcaagttccaataatgctatctttccccaaaaagcacatttgtttatatggagttttctattctaggggcaccaagaataatgtgtatgtagtgtaaagaagtggattattgtaaatttctaacagatctcactatgaagatgtttgtacccataaaacagacccagagggcattgcattgaaattttaatgtataaatgtgcaaagctgaactgatagtatatttatattagaatgggtgtgttctcatttcaagaaacttaattttgaattctattttgtttttgatattaaacacacaaaaaatgtgattttcccctatactcttgtttcaggccacaagggcagccattactcagcactgcactgaccttgggaatttgctgggcaaggaaaatgacgtggccctcatcatcgatggccacaccctgaagtacgcgctctccttcgaagtccggaggagtttcctggatttggcactctcgtgcaaagcggtcatatgctgcaggtaggaacctgcaggctgtgcacagttcacactctgctgtgtctgtatcccgtgtttatacaaaagaaagggatgcatgggaattctaggtttaaagttttgtatctaaaaaaggcaaaacaaaaatacaaatttatttttaactgttggtgcacagattttgcagaggcagttagtggtttttacatttttgttttgtttattgtcttctgagaagataaaaagagtaagaaccagggcttccagtcacattcaccatgggggataaattggaaaaacactgcctcaagcccctttgagaaattactggggtccaacctactgcacatgtctgagctcaacttccaagatgtgtggggctttgatgcttcttttctggcgtttgttggggtatttcttttcagttaaggaggagctttggtcgggttcatgtgatagcaatttttgtggtaaaatctaaccagaaatctttgtaggttcttcccttcctgggaaggtttttttttttcagttggcagtggtgggggattgttacattccattggctgctggctatgtggaggtctagttctgatagaaatttgaaagtcagacagaattataaagacagtaaaccactagaaagatgagtggtcaccaaaggtcacagagagctggaggggctggctagtggagcatcagtagtggaaaggcatgtcagttttatgcctatggtcacaggatattcagggaccatggggatgaggacaaattcaaatgtgtttgaaacaatgagtgacaagtctgttgtacctttaagtcaggaaacctggtgcagctgtgggggacctggtgcagggagcaatggccagagcaccttgaaatacactgcttctgggttttatgatggcctccttctcttttcctcgaatagcttgattgtgatacaattcacataccatacagttcacctattgaaagcaattcattgcctttgagtatattcacaaaattatgtaaccatcatcacaaccaattttagaatattttcatcaccccgtaaagaaactcctgtatccattatcagttaatcccatcttcctgcacgccttcacccccatcccaaacaaccaatcatctactcacttgtctctctaattagcctgttctttttctgacttctctccatccctgttgtttcatgtgtcagtacttccttctttttatggctgagtaatattccattgtttagatgtaacacatgtttatccatttctcaatgtatgagaatttgggttttttaccctttttgactgttacgtgtaatgctactgtgaagattgatgtacaagcttctgtttggacgtaggttttcgactcctctgggtacgtgcctagaaatggagttgctgggtcatgcagtaactccatgtttaaccttttgaggaactgcgagatggttttccaaagtggctgcaccatttctgttcccactggcaatatgtgattgtttcagttcctccatatccatgctaacacttgtcgctagctatctttttgattagttaggatgtgaagtggtatcgcattgtccttttggtttgaatttttctgttgattaatgatgttgatcgttttttcatgtgtttattggccatctgtatatcttctttggagaaatgtctattcaaatcctttgcccatttttaagttggattatctttttattattgaggtataagggttctttagctactctggatacaagtatctcatcagatagatgatttgcagtttttccccttttaggttaccttttcactttcctgatagtattacttgcagcaaaattattttgacaaaggccagtttatctatctttttcttttgtgcttttggtgtcatagctaatgagctctctttttaaagtagctgatcctgtgctttctttcctgggttctatttgagcagtttagattagggctatgcaaatggaaaacaggatggaaagaatggtggggaaatacttttattcataaatttccctttgtttctacattgtaaagctgctgagtaggtgggtacctgattttatgaatttctccacactggaggttgttactgctctacctcagagccgtgagtcatgggagtcagccacttctgcctgccactgccctgttgatcaaggggtcatccccctgactcgctggtggacaaaaacaagtaacaacgtggaaaagtctggtaaactgtaacccaatgcaaacaccctaaaaccttataagtttttaagagggaaatcaaaatgagtccgttggattctcaggggagatccaggaatgcctgtaagggtttacaggaacatgttcttttcttgccaggtgcttgatactaaaacacacacacacacacacacacacacacacacacacacacaacttttttccccttcttgctgtgactgcttcacagtgctttgtgtgtctcataggccatatacttgaagacttcaaaggggagttcaaactggaattggcacagaaagaggaaatttcaaattaaatactgttacagtctacaaaatggaagcattaattgaaaaagggaatttaggatagtgcatcattttcctgctcttggagacatttcttggctgatctcatacttaagattttaaaaaaatcaacatgtacttaaaaaaaagaaaaaagcacttgtacacttcagatgtacttactattcattgaaaatttaaacttaagctaaatttaatatgtggcttcaaacataaagttgaccttaattttcacttttcatcttcaaaatataatagttgtgagagttacctatttctctaataatgaaagaagtaattttttttcagaaaataactggtctatgaaatcatgaagcatgttcctatcaatattgattcagaaattggtgatgttgtatagaaataaatacctttaaactaaaacagtactttaggcagcaaaaagaagggaatgcaagaatttattaaatattttgctgaaattagaatcaaacaatttgctaattatgcatttctgtacccgaatattttccatatggttaaaatcctagagagggcatatatagtcagcactccagtataatttactttgtatctggcaggggtgttgccatgtaattagttgaagtgtaaactggtccagtccaaggtttttattgtgggcttgcaagtattgtgacatttacattgcaaattcctagtgtcatggatgaataaggagaggagacgtggcctttggtgtagaagtgcaaatagtgaataagagactatgttattgtatttgcctctattcctttgcatctcacatacatcccaattccttgaaacccagcccttagtgaagaaggcatagctgggtctccatctggccacatgcagcagactcccttttgtgcttgattttcagatcctttcagcatctggtgttgagggctcttcccttgaggggttctctttttcttctgtggcacctttctcttctccttaagttatctgtctcctttatgggctttctggctgcctgtgaagtgttgttttcccaaggttttacctctggtcctatcgtattcccactccacatctccccgtgtgccttccatttaatgtgtcggatggcctcattcatcttatacattagtgacttctcacaacaccagcttcatatggaatcatctggagaacttttttgttgttgtttttgtttgtttgttttgagacagagactcgctctgttgccaggctggagtgcagtggcgctatctcagcccactgcaacctctacctcccaggttcaagcaattctcctgcctcggcctcccaaatagctgggactacaggcgcacaccactatgcccaactaatttttgtatttttagtagagacaggatttcaccatgttggccaggatggtctcgatctcttgaccttgtgatctgcccacctcggcctcccaaagtgatgggattacaggcatgagccactgcacctggctgagaactttttaaaaacatattttcctcaaaaagctaaatctggaaagtaccatatgacccagaaattgcactcttaggtaggtatacacccaaaagaattaaaaacaggcactcaaacaaatacttgtatgtgcatgtccataatgttcatagcagcatggcccacagtagcctcaaattggaaaacaacccacatatgaatccatacggtggaatattattgagccataaaaaaaaataaagtagtgacatgtgctacaatgtggatgcagcttgaaaacaggctgaatgaaagaagccagtcacaaaagaccacatattatatgattccattcctatcatatactcagaataggcaaatccacagagccaggaagcaggctagtggttgccagcggttgggaggaggaagaatggccagtgactgctcagtgggcatgggatttccttttgaggatgatgaagtgtttttgaacaggctacaggggataattgtacaacattgtgaccatactaaattccactcaattgaaaatggtcaattttatcttatgtgatttctacctcagtaaaatataaataaatgaataaaagaattcatccatttaaatgaaatgtttgttgaattaaaaaactgatatgtttgaatgaaagttcactcatttgaatgaaatgtttgttgattataaaaaatgaatcctttgagcagaagttttgttagtttaaatgaaatgtttgtggaaagaaaaataaagagtctgattcccaggcccttcctcagagcaataaaatcagaactctagaaattctacaaactccccgtggcacctctcttctccttagttacctgttgattctaaacagcagtcagggttgagaagacaacttctgccatctgcttgtccagcgtggcccctcacttcagctccagtttctgtacatccaaccacatctaggacttttttttttttttttgaggcagtcttgctctgtcacctagtctggagtgcagtgccatgaacacaaacacagctcactgcagccttgacctcctgggttcaagcgatcttcctgttcagtctcccaaatagctgggactagcatgccactatgcctggctaatttttaaaatttttttatagagatggaggcttgctatgttgcccaggctgctctcaaactcctggcctcaagttatcctcctgcttcctcctcccaaagtgctgagattacaggcatgagccacagtgccagggccttttgacagcattagcaagcatggttttatatctaggggacctttagagagattaaaccatataagcacattattaaattgaggtcagacattaaaatctcttaatttgtttatccttttcagtattgcatttagttttataaataaggaaataaaggcctcagaaaaattatatcatgttgtctgtggtctcagctaggagtggaagagatagcattttatgttctatctgaataatatcagggcctatgctcttaagtcacacagttggctgtgtcagctaattcattgtcacacgtttattactgataatacagttttgcacgaaagttttgcttttcacatatttttcaactgtcttatatgtttagacttattcaagaaatcaacataaagtcttgtaggatttgtcattctccaaaggggtgaaagttatgtggaaaatgtgtaaaccattttcaatatgttcaagaaagagttatctgttctttcttccccctttctcattttccctttttctttgaaggtctttatttttgtccaaatggagataaattctctagcacagactaccaggggagaggactttgacctcttgagaacactcagaaatctttaaagtgactgtctcgtcaggaaaagagtcatgaaagaatcatcagtgaccccctgtgaggacgttagtgatggccccatcagagtccccagcaaatacaggtgacatgggggccgctgggcactgcctcattagcagatgtgatttacggcttcacatctctgggcaagagatggagtggaaggaaaacaccgcggcagggatttccacgggatgtgcaaattaagggtttccaaaggcatcatttattttctctgatatgtttagacttctgtctttcaggatagattcaaagataaacatgtataagcctgctgtgatatcatagatttgaaaacaggagagagaaaaaggccgagtggacgcactgaatgtttaaaaagacttcttgggtttatttttctaactgtaagagtgatttatattttttgtaaaaaattagaaaatacagacaaacaagaagaaagaaaatggcattcacaatccccccaactagggattagcactgttgacaattggttgtgaagtcttgatctccttctgtgaaaacacttttcattggacgaagggttacaccttttacaatatgcaaagttaaaggttatacacagtttctatgtcaaatttgttttttaaaagcataatggtgttctgttatatgaaaacacagcaattaatttattcctaattgatggatagtcaggttaacaatgttttttacatgaatagttgcaaagacacttgatgatgtccataaaacaataatggattcaaggataagcaacatagaaacttgcaaaagggcttgtagccttagactcagaaagtaagatgaattggcttagagtcagagagagatgactagtagcttagtccctgctgggacaaacatattctcctctgtttagtaagcatagtatggattccaagccccagtttggggtttgttagcctcactaagaaaggggagcagtttagaggttattttgtgaaagtatgtatatgtatacatgtatatatatactgtccaacattttaacacactggcagtgtatcattcccaacgtcaggtcagtcttccagcctatcctaagcttatcactcacttagcctgcattaaaaaacctggtggacatctgtcttaactttagactacttaatgtagaaaagaactggctcttctgatttggttccttccccagcttagcttttttaccttaatgaggcatgatggataataggaaatcagaacgttatgcattttgtgtgtggtatccttcagcctgtgaactacacacagaattatgtcaaaacagagttcagatgcagtaattagaattgtaccaccaattgtgttttagttggcctccatattggtagggatccaattgtacacttgcacaaataaaacttttctttagtttcattcatgatgtgatttctcagcatcatgaacgtttagttataagccagcttcctactttgacatcctattccagagagcattattaacttgtcgaggctgtaagtctatccttgggctgtttgattgtggcttagtatatatttgcccatttgttgattgcatgcaattaaggtagaattcacttttagataggtttttttaaatttaactctaacatgaatgctattgtttgaatgattacagcaattttatttggttctaaatggcttcattgttattttattaaggatgagagcgctcagatgtaatagttcttcagcaccatcttggaaaaaaaatttctcaaagcccaaagcttaaacactgtttttccacccacagatcttaccataatttctctagaataaaactagactgatgcagattttgtagtatattaaaaatagctcacgtgaatcattgtagaggccagaatatgtagagacttgagtattaatctaaagtaggaaaaggaaaccatttctaaataattatttacagcttaggaaaaaaaacaagctttttgaaattaaagctaattttgatgatagcacatttagaaatggagggcaattctcatcttaaatacctattgcagcaaataatttatatgaattactctataagatcaatttctaactgttagggatttctgacgttttgattcccctctaactaaaagttatatatcatcactatctgggtgttactatttcaggtgagaaattttttaaaaagtagcgtatcaactttgtttcttatgtcctggactaataaaacaatttggtggggagcaatatagtacatgtgataaaaatgtggacaaatatttagtataagattgaaaatacaggaagctcttctgcttgtcagctatgagcaactgagtgaatagacgtggataacatgttgagaatacttgccaaggggcatttaataatgaggattgatctataataatatgctgtgtaattgggaacacatctctttggagtttttttggcttataaaattattaccatatcattttgcttatatagtagacctacttttcctaatggttctgaaacctgatttacatggcacaagttcccctccactgagtaccttcacactagtgtttgtttgcagaagctcagatgcaaactgaacagtgggagtaatgaagccctttcctcttttggcagtagtctaagaattatggtaatagggtctgtgtgatctcccatccatccgctctgcagctttcaacacatggggacccttgtgagacaccagaagagctcacagacacatgacttttcaagacttttcctgtgtttctttttttcctttcccctttttcatgaatgattacttcatcagtgcatgtcatttttgacaatactgcttgccaaatgaaacagggtgatacgaggtcacactgtggcctaaaattctgaagtagaagctcataatatttggcatctttcctactagaaaaacaaaccagaaaagaaaatcaagaacagagcttaattaaacatgtggaatatgtcatgaatatttatgtccccaagtcttgccttgtgatggtatttgtacttaaagtgctttttctcctctttcctgtgaaataattcagaatgtgtttcattaatacaagaatgtgtcatgttaactttcatcaggaaaaaatttcacttctgacaacactgacacctttctgattgaaagtatgcaaaatagctcttacgttaattggtcccaaagaaaattatgttatccattttcctgtctatacatctgacactttccctcatctgtcacctcctgaattatcaatgctttcccttgcctgattttgacagccagtattctgcctatgactttaaaaaccataaaaaaaaaactccatcctgggagctttactgtcctccagtttgaataggaagccccaagattacagtcagcaaggtgtagccacatctactactatgccacatctagactgcagtttctctattttaagcctctcccattgtttcttactcgttgaactttagagaggaaacaaatgacaaagaggaatgtttatacttttttaatatttagtcttatttagggtcacaagtaaattttgtcagcaggagctaggtcagactgacagagctaactaaagttgccaaattttgggagcctgtgcttggtttgagttttatgattggtgatgtctgcgccttatgaccattgtcatctgcagagctttgctgggtcagcagagtctgagagggtctgttgaatgatttggtttctgttgtttcttgttaaccagttaactgagctctgtgagagtcccagggctgaattgtcgccagtggtttagtttctgacaggcctgtaagtgagagaggcagacagacagagagacagacagacaccccctccccaaccgtcccatcaaattcttgacacctgggtcatctgagcaaaacagagcatgcatttttttctcttactaagcaagtattcatagtggcgtcctttcaccacttggacacaccaatcattaaagaccaaagtaaatacaccaagttgaagataatcctttcacaaatatacaagtgccaagttaaaactgcctgtcaatcatttgtgcatttttccttactcttgtctgttttaatggatgggtgtggtatgaagatattagagcttgagaaattaggattcctgtgttatcacaattattttgcctctttacagatgattgaaccttaagttcttaatttctctatataaaatcatgatgaatagatactgagttttttttctgaaacagaataacaatagtagggaatatatgtttctatgtagatacatgaacacatgactatacatttaagctcaatgttttcaaacgatgatgcttcacattgagaaatgaattttgaattatcaaatatgggaacaagtttaacaataatatagaagcagattaagtctttttttaagggaaaaaagtaaatgttgaatgatattagtttaatgacacttagatctgaatttataatcccgtgtacctataactgtagtattagcctatgccaatataaacctagttataatacttaaaaataatgaataatgaatgcaattaagggctgataccaacatttcttgaagttttgaaataattataattagagatgttaaagaaataaagtaggatctttctgtggtcatatttgtgtttcctttatttgaaatctgctgccaagagtcttcaggataactcatcgctgggtgtcttgcatttctacatttctacttcagaatgtctcaagctcaagatttctttggtttagtttcacatgtgtttagataatgttgtggagaaggaggagacttttattttttttaatttttaattttaaagtatggatacgtactaattgtacatatttatgggataaatgtgatgttttgatacaggcatacaatatgtaatgatcagatcagggtaattggggcgttatcacctcaagcatttatcttttcttgagtgttaggaacattccaactccgctgttttaattattttgaaatatacaataaattattgttaactataggtgtcctgttgtgctactgagcatcagatcttattccttttatcttactgtatgtttgtacccgttagccaacccctctgtatctcccatcctcaccactgttcccagcctctggtacccagcattctacttaggagaggacttttagacatcttataggtctccgtaagatctattttgtatttgatcctaatatttttttgaaacaggcttttattagtgtggttgaacaggtaaccacactgcttgtcaggccagctcccaggactggccaggctgttcactgtgacccaacttgagggagtacctactgtttaaggttgttgggtgaacacaaatggcacaacctttgcctgcctagagggctcaatctggtgggaaggccagtctggttatgacaaatggtaacacagtcacagcatgaggtgctatgaaagctgaatcttgggagatgacacagcctagtaaactccaagggatgagtgtgtggtgggaaatcctaatgccatcaagaggctagcactcaagctatcgtgatgtccagaccctctgcaaacactaacatctactactcctgagaatcctgaaaatgaagaggaaagttattgctcttattttataggttagcgaactgaggcatagactaacaaagatatatcctgaggtcctctaggtattttttttgttttctgagtcagagtctcactctgtcgcccaggctggaatgctgtggtgcgaactcagctcactgcaacctccgcctcccaggtcaagtaattctcctgcctcagcctccgtagtagctgggattacagggggcgtgccaccacacccagctaatttttgtatttttagtacagacagggtttcactatgttgacgaggctggtcacgaactcctgacctcaagacaccagccctcctcggcctcccagagtgctgggattacaggcgtgagctaccgcgcctggccagtcctgtaggtattaatgaacagtttcaggatttgaactctggagtccatgctgagagactattctaaagataatggtatggaattaaagtattttgagcagagtagcagagctagatcacaggctgggcatggtgactcatttctgtaatcccagcattttgggaggctgaggcgaaaaggttgtgtgaggccaggaattctaaaccagcctgggcaacacagtgagaccacatctctatatttaaaaaaaaaaaattttttttaaagcaaacagagccttaggagaaggcaacactatggaggtcaagttagagttcatatgcaaggtagaggcccgtgtaatacttcaatttagcacatgttagacttccactagggtcacaagtctctggcacatagtaggtgttagaaagaaaagttggactgaatttccagattctctggaatggactatgatccagatttatagtcatttaagagttagaatctgtaattcttagtgactgactgaatgtacttggggatggtgagatggggtagagatgaagcactgctgtaagagagctcatgtcagagggggtcctggaggaggagttcatttccagcattgtgagatgtttagaattaccaccagctgctgggtgttcacttctggtgcaggtaggattctgccaagcccatattctcccagttacaggctatcaatctatctgaagctagaaaaaaaatgcctccttatttatttattttgtatctagcatttacagaatgcccatttctggttagtcaccatagtgtacagggctataggatgaaaaggagagagaaaccatgagtcaaggatacagtctcactcctgtatcaagttactttgcttcaaccagatgtatttattagactgctctttgacttttggcttaatgggtcaggggtgtccacagagttccccattagaaaggaattcttctacctatctctcagtctgcacagtaccatgagggtcttcatcttccaggtgtggaggtggcttatgtcagttagtgctgctgcccactagaaaccctggagcctggaagatgagccttgtaggaaatacctctttctaggtgcacactcaggactacgagaaatgttgaggaaggtgaaggattctcccataactcagtcctcctgggcaggtgactggcggggccagactttgagcatccttgctgaataataagcctgtttggtatgaaatccatgtgctactgatagcagggtaatcctgtggatttgctgaaaccataagggactagatgatacataaaaaggatatcagtgattccacgagtgtgtaacacgagacaaaagacataataaaagccaacctaatactaagcttagatttccatactgctcaggctatgtattaaaaattcttactgtagaatttttaatcaactggagttttctagtaaactgaattggtgtatgttaaaagggtcggaaagtcgggtagggatgatgggtggggagaattgcttgagtaagagatagtagccttaagaatatttccttgcaaaatatacctgggtattcttcatgtttaaaactatgtgattccagcaaagataagttatttcatttgataaaagcaaaagtaagaattatcctcatggaactaaaaccctgttatatttagtttactataccatgtcttccattaaaactatcctgagattaacttgatttatcttgtctcagtttaagtttagcaatttaatccctaaaaatgtagatagtgctcattgtatagaattctcccctttcccaaaatgatgtacgcttctcttttactaaattctcaactttgttagcccactccatatttcagtcttgctgtaagttttagaaagcagaaatcgcatcttctatttctaacttgaaaggcattttttacaactctgtgtaacaaatgtcatcgttcccactacgtctgtttttttctgatagggctaagaggcaagttttattgatttagaatttttcaccagtttatatgcattatgctcttcaaacttgcttttatgtgtgcatgaaaggatattgatttagaacaaatttatattagcccacttttcaaaaccctgcagccaatcagcattatttttggtgctacagctttcatgtagacgttctgcaggaaaaaaccagaaagctctcattgccttgtaccgagattctcagtcaggagtctagaaaagtctttcttgaatctagtagttagtgattcataagtttttgttgtttataacttagtacttttttctgaggcgattctagtcaattcacaagtctcctaaggattatttcaaatgcaggtcacttcgtgttcttgagatgactttgaaatccatctgtgtgtgtgctgaatgaatattgagcatatgtgtcgcaaatatgtttcctgacaaacaacgtgccatgttctgggtcctggggagctagcagctccccagggtagctagcagctaccgtggtggacaagatcagcacagcccagcacaacccctgcctctgtgagactcagggcctgggagaagagctggccagtaaaaattacgtagactgtacagttatgaattagatgcttggtctcttgtatttcagcaattagatgcctttgatcttaggtacgttgaattcttaaatttattagcttctctaatgctgtaggctgatatagatttctgtggctatccttaactatcagctttgattaacccagagtttggtgttcaaaaagaagctgtatccctctgctaaaagaaagaaaggaaggaaggaaggaaggaaggagggagggaaggaagaaaggaagaaaaccttctggtgacctctcagaattaaatttaaaaacctagtgggatgctgcttctcccttgctttctgtgtcccggccacattggactcctttctgttcctttggctctcaaagcaggctttgccccaggactataacaggattttgccccactgacacatggcaaactcacctgattcaggtctttgctcaaatgtcaccctctcagctcaaggcagggtaccttgagtactctggctctgttagtgccactttccatagctttattttgcttgatagcatttaccactacctgacatactattatacttttgcctaattattgataatctgtctccacccaacagaatgtttgtttcattagagcagagattgtgtctccttagccttctcttccatcctcagcactggaaatgacacgagacacgtaatgaacactcaataaatattggtgaatgaatgaatgatgtgataggctaaccaaaccttcactttcttggaggcagcctactcccttctcatgacagttgctgaagttatgctgagaacagtggtgattgtaactatggaaaatgtttagggtgtcagggtcaacttttttctcctttggttatttgtccaatgcagggcacctgcttagctacttttatctccatgttcttggctatctacttgtaggaaatagatacccatgtaagagaatgcaaaagtctcttggaggaaccaaggagccttatgtatccaagttagcatgtactgagtgcagggtgctcttaagatctctgcttggacactagaaatagaaaaaaatatgtatgaagaagtttggataaatgcttcatttgaaagttatataccttagtatttgctttcccattctcatgccacttatgaagggtgaagttggcttcattgacagctaatactgttgaagtctattgtaaaatcagttcattaggttagtgtctattgagcaactactatgtgtatgtgttgtgttgggagtagtgcaagatgaggctggaggagaaaactggggccgaatcacccaggtctgcaagtctcattggaacttggacttgctcctcagtgcaatgtgaaacctttgaaaaattttagcaaaggaatgatgtggtcagatttgtatttttaaaataacagctttattgaaatattagcataccatgtaattcacacatttgaagtatacaattcaatcaaattagtatactcatacagcagtataactatcactactacattccattttagaacatttcatcatccccaaaaagaaaccctgtaccaattagtcattcccaatgtctctccagttccccagcccaaggcaaccacttatttactttctgtctctatagatttacctgttctggacattgctttgcaactggcttttcccacttactgtaaagtcttcaaagggtcattcatgtcgtagcatttcaattctttttattgccaaaaaatatttcattgtatagatatatcacatgtagtttattcatcacttggcggatagttaggttgtttttacttcttggctactatgaattatacttctataaacattcatctacaaatttttgtgtggacatatgttttcatttctcttgggtatatacctaggagtggaattgctggggtatatggtcactctatggttaaccttctaaaacagaactgccagactgtttttctaagtggctacaccactttacatttcatacattacaccccatacatttccactagcaatgtgtgagggtcccagttccaccacatccttgccaaaactttccttttttaagtcatagccatcctagtgggtataaagtggtatttcactgtggttttgatttgcatttccctgatgattaaagatgttgaacaacttttcatgtgtttgttagctacaaataaccagaatatcttccttgggaaatatctgttcaaatcctttgcccgtttttaaattgggttgcttgtcttttatcactgagttgtagcaattctttatatagtcttaatgtcagtatcttatcagatacatgatttgcaaaaaattttttctaattcattgggctgtcttttcacttgatggtattgtttgtagcacagaaattttaaattttgatgaagcccagtttatctacttttttttgttgttgcttatggggtcatatctaagaagccattgtctaatctgagatcatgaagatttactcctatgttttcccttacaagttttatagcttggctcttacctgtagtctttcatctccttttagttagtttttgtatatgttacaagataaaggtccagtttcatgcttttgcacatggatattcagtttttccagcaccatttgttgaagagacagtcttttcctttttgagtggtcttggccagatgtatatttttaaaagatcactgtcagcagggtgtgaagggtttaaaggaggagcgatgagaatagaagtggggagatcaatttgaaaaatatttatgtagctcttattacgtgtaaaacattgttccaggcactggaactatgatcataaacaagtcagacatagccctggcctcatggagcttacattctggcactgaggatgagggatacaaacctaacaggaaagaggaaaaagaagcaaatgcagtgatgacaagttgtgagagaagaaacagtgatgtgcagtgtataagttataggactactgaatatataaagcatgaattgcttatttagttttttcctttaatttcaaagggccaaacataccgactcagaggcaggttggctagagtggagttaggaaaatactctttctggaaagaaaggtgactttaatcattgctgcctatacatgccactatcaccagtgagtcttcacttaatgtgcatatccacctgctggcagcattgccagagtgactgtctgaaagaatggccgcttgttcattcgttcattcattcatcagattatggtagcatggattacagaggtgaagagaaatgaagagatttgagggtggtctagatgtaaaattgggaggatttgtagtcacatatgaaaggtaatagtaaggaagaaggagctattgagaatgggatcagggatttgggattttggtagttatgatagccattgagtgctgagaatgggttaggctctctattgagctctgtccaggcattattccatatgatcctgaaaaaactaaaaaaaaaaaaaaaaaacaccaaggtaggcactaccactaccagcagcagcagacaaaaccaaagcttaggggaggtcaagtcacttaccctagatcacaaaactatgaaactgggtaagtggtggtgccatgtgctactttaatgtacttcttttactttgttgagctcttcttttcaaaaagcatctaaagattgaatgaagaaatatacaacaattctaactaaatgtttaatgaagaaattttgaagggaaaaaatagaccaaaaccactttcttataatctcaccgactgtgtataatgaatggctgtcctttggtggatatgtttccttttcgagagatcaaccctcatctgaatgcctccctcagtatagctgctgctggtcttgtagtatgtgcttggttgtgcagttcctgtggtctggcatgtacctaatgcacacagattggattgaagattgaagttaacctcgcttatcgatggcattttaatttccttcctcttactacattatgtgttttttatgatagtgctttaaagtccaggcttataaggaaaaggaaacaatctcctatgcaagtccccagggtttcagtgaagcagatggcaggaagggtctgggcatggtgtgtgttgcctgtttcaaaattatgtcccatgcaccccagcatttattcccttgatgttggcactgggcaggtgatcagattttaatttgtgtggcgtggtggccttttagagtaggataataacattgggaaaattaggttaagatcaatttgtcatttattttgtcgtaataaaatagagtaaatctttcaaaacagatttacgtaagttccttgaattggaggaagcctcaaatctaaaacttcattaagcaacatcttaatatcacagagactcggggtcagaaaaaatttaaatgacatataaattagtagagtttttcgtttgctattcattttttttcccgttttattgccctggtattctgagtctcttggttcattcttacgtgtgtatcattttggtttgggttatgagtgctcactggcatactggtatacaacactgagagccagtaggctgttattttgctgccattctattgtgtctagagaagtatccagggagagggttgtttgtttttacttgatgaggtgcagaagttgggactgtactgaaaaacagaatgctaaagagccagctccaatctaggaaacatcctccaagagcaccccctgagacagagtgtgaatcacagaaaggaaattagatttttttagccccaaataagaaagattaaaacaccagtaaattgttttacattgattttactaaggttagttagaagtaaaggcttacaaacacgtactgtttatttagtgatagatgaaacttagaggcgtttcttctgttgtaattggttggctctttgcattgattagaactaggtagacaagttggtacaaaaatggcaggagtggaagggaatgggcccctgttgatgtgtaagaacatacgcgtgcatgtggggacaccagtggcattttctgcatgtttcggggtttcagaagacttgccttgttctgcacctctaaattagacctactgtgaaaaacttacaggtcagtttctgggagtgcttttcttcctggactttcccaggtgagcacttagatcctgtgaatccatctccgtgtcggaaacttccgtgatccggctctatgctttaattttgaatgtcttgctatttcatttctttgaaaataaagcagttccacaacattacagccctgtgctgtctactcattctcctttggggattgcttgttttaattgattgattcacagaggagaaagaaaaacaatttgttgctttggcaagattggtttttctaaggatgctactgtcttgctgggtctatgtggcagttagtaagagaagctggcttagcagttctgaggctgacatgaacattgcttcttaaattgaaaggttgggtgggtggatgggtggatgggtggatgggtggatgggtggatggatggatggatggatggatggatgatggagatagataagatagatagatacttgcagcaagcattcccagaacatttgttactcacctcactaaaattaagctgttgttattttgagatgagatggcagataaggtagattcaatcatttaacatccattccaatctcccgtctgtgtcttttcctgtcctgctgatactagaaagctgaaaaatcatcccctggcagcaagggttctgaaaatgactagcctgtcagaatcacttatgtaagacttgaacacagagcagaattaagtgggtagagggatggtgtggtccagacatcagcttgctggcctgactggcaggcgagctgtgcccagagctggcatcgctgtggggcccccatggtggcccctgtagcccatgcttggaggcaatgtaaggatggggctctggtggggcctctggtggctcctgtgtcctgtgcttggagacagtggtatgaggacaggtttcctcatgtagcatcccctctgtgctggtgtctgggtcttgggggtcatcctggaggcacagctcagaggctattcttcaagtctctctcctgattttataagctccgaattcttgtataaagttaccttctagttaaaatacccagcatgatttctgttatctgcacatgacctccgataaatgtatactttttcttttttttttttttttttgagaaggaatctcactctgtcgcccaggctggactgcagtggtgcaatctcggctcactgcaagctccacctcccaggttcatgccattctcctgcctcagcctgtagctgggactacaggtgcccaccaccatgccaggctaattttttatatttttagtagagacggggtttcaccgtgttcaccaggatggtctcaatctcctgaccttgtgatccgcctgcctcggcctcccaaagtgctgggattacaggcatgagccactgcgcctggccacatgacctctgataaatgtatacttctatgggacaaattttcagagttggcaaagaaaataggttcatctttatggaccttgggatctccgtgtgaaactctcaccttccctcaggtcgtccactcatctcacacgtggcctcttcccttacacaggaaggcaactctgggacgtttgctgatgatggctcatcgtgcccacccctcaggtgtgaaacctcagaaccatgtgcatttctcctcatcctcgtcccctttaaccattctccagttcttacttcctgatgcttgcttcttttgagtctaacttttcattcagccttcagcaatccctgtgctacgacagcctctgctaagaacttcatgcaacttgtcttattatagcctcataaaaaccctgtgggaggaaggttagatgccatgtcccaaggctgaacgtagtgctggactgggcagagaggcctcagctctgactggtctgagctgtgggagctttagctttttttttttttttttttcctgacacagagtcttactctgtcatccaggctggagtgcagtgatgcaatctgtacctcgaactcctaggctcaagtgatcctcccacctcagcctcccgaatagctgtggctacaggctcatgccaccacaaatggctcattattattattattattatttggtagggataagggtcttgctgtgtttctcaggttggtctcaaactcctgacttcaagtgagcttttttttttttcaataacagttttgttgagttacagtccatatactaaataactcagccacttagatgtacagttcagtggtttttaatatagtcacagatatgaacagccatcatcacactaaattaaggaacattttcatcacctctaggagaaagcttgtgtttgtctgtttttgctttggttgcctgactctgaggtcttactcaaaaatctttgcccagaccagtgtcctgaagcatttccccaatgttttcttccagcagtttcacagtttcaggtttaacatttacatctttaatccattttgacttgaatgctgagagataggcccgagtatgtacagctgttatgtatcaggtttttaaaacaggtaacctggtacacttgaacagccctagccccctgccctaagcagccacttacctacttcccatttctatagatttgcttgtccttcccatttcttgtaaatggaatcatacatcatgcagtcttgcatgtgtctgtcttcttccacttacgacagtgttttcaaggttcatccacatccatgtatgtgtgcttcattctgttgtatgattgaataatattccattgtatggatataccacattttgtttatccattcatcagttgatggacatttaggctatttccaccttttattgtctatgataaataatgctgctatgaacacgcatgtacaagtttttgcaaggatatgtgttttcattttttcctgggtatatgcccaggagtgaaatcactggctgaatggtaactgtatgtttaacctcttgaggaaccatgaaactgttttccccagtggctgccttattttacactctcaccagcagtgtggaaaggttctaattcctctacatccttgccaatgctggtatgtgactttttgatattatgtgatgtcatgtgacttctcgcttatagccatcctagtgggtatgcagtggtatctcagtgtgggagccgtggctctgaaccccattgcagtaataccctctgctccttagtagcctcctcagttcaatttccccttcttccttgatggcagtagctgatcccttttgtttccagggccttcatcaatagattgctacctaagagggttactaaagtactgtttggtcccaagacttccttgaacaaggccatcaggaagttccccattccctatagggtgctgcctgcattttgctggggttacaggtaccccattattggcctcagccttgcattctgcttttctctcaggcagactttctgaccaatgagactggtatatgttttgcatcctgtacatgctatgtattttgacacttctctttcttgatcccctttctacccatatcatccagaagggactttggtgctgctacagaatttattattagtaacacacacttggcactaattcattgctgtatgttagttgtctattttgacttttgtctgtgtgtaccaaaaatgcatataacttataaaagccacaataaaataagtatttttttctaattccctggctaagacactcagtcttttcaagatccctgtgtacctaagatcatatcctcctttctatcccacaaaggtaactaattttattaattttatcattcacttgtgtttcttcatagtttctataatgaatcaaattgcttatttgctccataatcaagtacatgaaatttgaatggaattgtagtctattattttctgcattatgagttattttgttcaaggttacttgagtttactccgtgttaattcctgtaggtggagtgtattcattctcactgctacataaagttccattgtatgaattttacctcaacttactttattattctcctggtgatagacatttggcttcttgccagatttcaagtgttacatatgatgtggctacaaaaatagtaaatgtcttgggcaaatttgtttttggacataatacttgggagtagaattgcttagtagtggggagtgggcatttttaacttcactaaataatgcaaacttatattcttaagtgaattaccaggagtttataaaaatttccttagatctacattcttgccaagacttgtattttcaatttattttaatctttaccagcctcgtgaatattaaatgctatctcctttctctaactttatacttttcttcttgttaaggagatgacattccttatctttagcaatgtgtttttgccttagaggctcttatttgatattcagttggctacagtgagtttcttgtagttagaatttgcctggcagatcttttacctccttttacttttggcttttctgtattgattttaaacatcatctagccagattttgtttgttttctgtttttaactgcattgaagctggataattcagttcatttgcacagaggctgtagcgattgttagctgttgtttggggtaggtgaaaaatgggagagaggagtttgcttgcagccattgttctgggcagcattccagtccaagatggcgccaggatttctcaccctctggggcactccctccacgtaacccccgagactgcagctggaatgagttttacttccatgacgagctgactttaggaaagggagattatctgagcaggcctgacctatcacatgagccgtttaaatctgggtggagagaacagagataggggaagccagggagatttcaaataggagtaggatttgatggaccgtggctggtttgaagatggaggagaatgcgtggccaggaagtaggtaacctctaggtgctgggagtggcccccaaatggcatccagcatgaaaatgggtccctcagtcctacagctctaaggaactgaattctgtcacagccatgtgagtttggaagaggatcttgagctccagatgagaacacagcctggctgataccttgattttacacttgggagaccctgagaagaaaaccagttataatttgtcatgcagcaatagaaaactaatgcattcatgtggcatctgggagggctctgtgcccatgatcaggaacttccagaaggtaattgggcataaatacccagcactccagagaaagattcagcctggggatggattcaccatcactgtcactaacaagcggtagaaatgggatgtgtgggtgaggtcagtcagagagagtgaacaggcagggagaggctgaacagggaagcctggacaacatttcccaatgttgaattgtgaatgatggcctgagggcctgaaaattgatagctcaaggcactgtgagttataaaaactgtaagttttatctccttgatgagttataactcccttatgagctgagagcccattatatactgactgttttcaaaaatacccagtggcctcatctcatattatttctccattttaaaaattcacattgacttctttgggctccacagcacatgcaggctgctgtctagttccttgggtcatttcctggggagtaaggaagagaaataaatcccttccgtaggaatatcttatggtaggcatggaaaagtagaagaaaatgaggtatctgtttttatgatgtcctaggcccattgaccacatcttgggcccacaaagggtgtagacaattgagtgagaacaatcagtataaagtctagattaattttatcctataccagttcaggaaaccattgcctcttccggttcctaggtgtcttcaataaaaaagagttatcagagtaaacaagtgattgaaatactatgtgtcagaccttctgctaggacctgtagagtaaatgtcaccctagataggcagatttcctgtcctcccagagtctgtcatctatcaggaagtgtagcctttaaacaagcgctctgaagaagctgtgataaatgctgggttctccattattgtcatctctgaaggccattggtaacctggaggaatattctcccactaacaggagaaagcacaggatcaaaaagaaaaacttcccttcattcttccagtttctcttaatcattttgccttttacttcctgtcctctgtgagcacgtgtctgtactgttaagtacaaatggacccagaggtttcaggcaaagcctgagtgaggcgctgcatgcctgtcttgcaggtcagggctaggaatggtgacagggctaggaattgaccattgctccattaaagtggaccaaagtggaatctgagtccttttcaggccctaggttcagtctgtgctgactctgaccctctgagatgactattcccaaacctgagggaccgaagatcagcatcaaggacaacagacaggggtgctggggtgcagatgtaagtgagctgggtcttctggagcgctggtcactgcatgctgtgggtataaaatggctgtctagtggaggcagccaggctgctgggaatgactccaggtagaccagacacatgattcttctgtgccttcaacccgatgctttcaagtggcgtgccttagctgtggacattctgaccctgccttgttgaatgctttttgtatttttgctcagagagagaaatcagagtgatttcttttttgtcttatagatcaatcttgtagcttttaaggcagctctccataaggaccacaaaagatcagtctgatagctagatgtcacatgctgtggcagaaacactcctaccagcatacactcattctgtactaggaactatagtaggagttttatttgtgttatttatttcattcacatggcaacaccattttcctggtaagatgactgaagctcagaaaggataggtaactcaaataccattgctaaatatgtttacctttagtatgtagatagacacgcattcagaagaaaacgaaggtgaaatattttggacccgtttgtttcgaatgcatcagtggtgtttattatttaaagaaattctttaaagagaatgattttgtaaagaggataattttctaatttgtgtcaagcaggttgtaatgttttgtacaagtacctgaactagggtacccttgctgagaaggtagtaaagtgtggctatagctacatgtaaatgtaactcaatgtgtcaggtgtccctgtaactaaaggcgcaaaagtgtgaaaagaatggcaagtgaagggcacctggacggtgggcatgttcgtttcctgttgccactgcaacagattaccacaaaggtagtggcttaaaacaacagtaagttattctcttaggttctgtgggctctggggagaatgtgtccttgccttttcagctcctagtagatgctggattctgatggctttttaaaaatgataaattcctcggcttgtggccccttctctcattttcaaaatgtatcccttcattctctgcttctgttgtcacattgctttctccaatcctgcagtgaaatctctctctctctgtggacacttggaattccatttagcgcccacccaatctcagatcatctccccacttcaagatcctttactatacctgcacatttcctttttgccacctaaagtaacatttataggtttcagggattagggtgtggacatctttgggggctgttattcagcctactacagttgccttgaaaggatataggaattatcaattccagggagtccttttcatagcaagagtgctagatttttgagggtctggaggtaaaagaccctgcaatagggcaggaatgctgggaggaaggctccatggggaaaagagaaccaccccaaggagaaggaggtgcagtggacagatacatacatgtgtacatttcagcctcatttttcgttgtcttgattttccgtgtagtacctggtgtctttaatatcatatccccgtccttctccatcaggggtacatgcatgcacgtgatgtagagctggggtaagcaagccgcagagcaaacctggcacatctcagggtgtgttttttctcagatctcagaaaatagcatttatatgtaaattaacctaactatggtgtgatggagaaaccatgaaatgataaataatcaagcttaacctttatgtgacaaactttggtagtcttggaaatatttttgaatatattggaacattacagaaagaagtttagagagttttttggggttgtttggtttcacaaaacattaggtaccacaaaatgctgtggccaaccaggaaagtgattttggcaacggttactatttgtgttctcttttgtcaacgccaagggagccgccccatgccagagctgtatttgcattactgaaaagcaaatatctcaggcctttggacaacacgatacactctcacatgccctggagactctgcgtgtgagatgattggaaatgctcatggctaaagtcagccattatccggaataaactttcccagagggagtttttcagaaacacaccagggaccagtaataaaacataaactataaaatgtcctctagcaaccaaaacacatgggatgtttttctatataatatttcacattaaacgtaattgtagattaacttttatagagaaaatattttttcaagccagatatgcttaaatcctttcatttcctcaagtatgacaaagcactgggaatatactcccctttgtaatttcctaccgatttgccctagttatgaatggaacattaactctgcgaaatctacatatggaaaacgaccccagatgaaaatcttaaactggccatatccctaactctggagtccaagccctgtgctctggtcctggcactgtggctcaccaggtagtcacgtgaccctactcacctgtgcaaatgcccccacgcttctcagatcccaagctcaagggggcgttgaggatcaggtcacccacaagttcccttcctgccctcagcttgcacgtggctcatctgtcaaggaaccacatactgtgtcagattttgttaaagcaaaaaccggtttttatagtctttataaaatgtaaaaacttggaataaatgtaacaatatctaaattcctggtgtgaatgaacagcagctgtagtgacaaagggaacaggtcttgaagtgaaacctgcctggcttggaattctgcctctgccacttaccagctttagtccttgttgaagaaattagctggaatcaggagttttctcatgggtgaagtgaggatacctcatggagaagtctatgcaaaagtaaggttctcagcacaatacccggctaataatattacctgcttagagagtgggggtaacagcaggtgcaatgtcatgtctgctgttttagctacaccaagctccatccacatcttgagttgatgccgtgaataaaggtcatattacttttcagtattactggggatatttgatccatgtgatgggcagataaaatgtctctgtcttagagaaaaaatggactttttaggtagccagcattgcaatgtactattgttagcagacatttgagatggcttctaaaaaccgtgcaagtgaaacaccccaggttttgagaaggggggagcaccgtgtcccaggtcacagggctgtctgtgaacagaattcacctgtatcccctatctcattctgttttacccctgcagacttttgattagacatcttcattgcatcctgagtgacgggaaaatttgtaattagcaaatgcatctgcatatagaagtgtgtgcccgaaactgctgtgcttttagttctcatatgcgtgctccttggaaagtgactgttagtaacattaactctgaaaaccctgtttttcagattgcaaacgtaacttctttccaggtcctattaaatggagattttcctcttgcattcttaaaaactcagagctaaccttggagtggtgtctctttctctccacctctctctccctttctccttctctccttcctcctccactgtttttttcccaccctccccctctctcctttcttgtgcaagatttcagtcagtttactgaattgcctttacatggctatgaccttgaattgcttctgttagttcccctgtgctcttccacattttttcattttaggactacaggctaagcatacttagttattaccttgtaatacacaatcaagataacctggccttggtttctgtgactgtatctcagcctccctgtcctctgtctcgcagagaactagggaaggatggaaagtgactaaaggtatggaatgcctgaggcatggccaggccaggtactgtggcacatattttcgtatgttgtctcatttaaccctgattcataccttttaggacaggtcatgatattcccatttaactgcgctttaaagaagttgaatgtccactgggtcacacttggagggtttaagatctggatttgggtctgagtccaaccacgatgtcatttatatggactgtgtcgcgacacgtgtgtctttttcctggtttggtgttgttattcccctggcaaggtgtgcatgaagtcggtcctgccctacacctgttggcttgttttgtttgacttgtgtttacactcctttttaagatgactttgttaaactgaaaaaaaaaagctgaaatgttgatcaggtagcagatttgcaggagacctaggtactcatcactctagcacttcctaaactgtagttaaagaaacattgttcgggatgctaagtgtaacgtgggggaaaaaaatagctctctgtgcaaataaatttgtataattgttaaatgtgattgctttccctctgagtctttaatctgataatgtgcattctgccagaagggaatgtagtatactgcacctccccagcttgtttttgttcacatctaacttaatttattagaaagcagcctggcgcagttgtgcatgcctgtaatcccaggactttggaggccgaggtgggcagattgcttgaacccaggagtttgagaccagcgtgaacaatatggtgtaaccccatctctacaaaaaatacaaaaaattaaccgggcatggtgccgtgtgcctgtggttccagctactctggaggctcagttgggaggattgcctgaactcaggtggttgaggctgcaagtgagccgtgatcatgccactgcactcccgcctgagtgacagagtgagaccctgtctcaacaacaacaacaacaaaattattagaaagcaaaagtctctttaagacaggtatgtcttcaactctatcaagttggcttttgttttgaagaacaaaagggaatcatggcttggcagtttcagctatgtgtggggactactttctattacactggtcctgcttttacctctggtgtctaaaatgtaataaatatgtgaactagagctcatagggtagcttcaactctgcttagagtttatagcttcaagtggcatgatatctgtcacactcacaagtagtatccattgctgatttctctttgtggttgagcttctttattttattctatattcttactttataatttttcatgtataatagaccaaatgtgattgccataaagaaggccaaatgtagaatccatgcccagtttgcttattctggaaaagcttactatgtaagctgggatttgaggagttcttagatttttattattgtttgattttttttaaggaaggaataggccaggcatgagtggctcacacctgtaatcctagcactttgggaggccaagacaggagaattacttgagaccaggagttggagaccagcctgggaaacaaagtgagacctgtctctacaaaaactcaaaaaattagccaggttggcggcacatacctgtggtcccagccgcacgagagactgagacaggaggatcacttgaacctgggttgttgaagctgtagtgagccatgttcctcccactacactccagccaggtcgcaaaaaagaaagagaggggaggaaaagaaaagaaaggagaaagaaagagagagagagggaaagggaaaagaaaagagagagagagagagagaaataaaagaaagaaagaaagagaaagaaggaaggaaagaaagaaaagaccggaaggagagagaaagagagaaagagaaagaagaaagaaggaaagagagagagaggaaggaaggaaggaaggaagcgggaggaagaaaaagaaagaaagagagagagaaagaaagaaaagaccggaaggagagagaaagagagaaagggaaagaagaaagaaggaaagagagagaggaaggaaggaagagggaggaagaaaaaggaagaaagagaaagaaagagagaggtgggaataaagataagggttaaagccataacaattaaaatattgatcaattgaactctcgtgcctgctattttttcaattctcttcccaaacacttttggccaaagaatgctttttatttggggtaaatgttgtccagccttaaattttcatttttctgggtaagggtactaaatcctagagtgctgatatacgatatttaggcctcaccccattggtaagtggaatgtgcctgttgatgtaatcaaattcacagaatgtggaatataacaccctcttggttaaaaaaataagcagagggatttctggcagaatccaactaacactcgcagaaatgaagcacatgaggtgacgaatacaaatgggtcacttagaactaggaaaatccattgtaacagggcacagaacttgttctttttaagcaagagtcttgctaacatccacatttatttcattcatattgaaggtcttcgaaagcttaagctctgaaaatggaagtggttgatttgaagatgataaatggaaactgggaaattagactgcttccataggtgggcagtgtgtcctctttttcaggactccggggtccctgaattgtgagttttccctcacagcctctccacattctctgtgctgttcacctcccacccactgctctgtcttccctgtgttagtgaaaaatcaagcttttccctccctagcccagagagctgagcttttccctgctttactactgtgtttaggaaaaggaggcagctttttcctaaaaagcagtgtttggaagttggaggcacgtatgatgctttctgggctgttatctccaatatccttgctagatgagcagcctcgcatgttgggaaagaatctgtaccagaattcggaatatggggcttgtggccacgtagcaatgaggtcactgaccagctacaatccctggagcaaaccattcacactgcagtcctctgtttcctgctggtgatattcgaggtagtggccatgtgagctccaagctatgatttgttgttgttctgaaattctatgtattatttaaattataatacctcagataaataaatgaaacatctcctgaatttattcttaatatgtaattcatggccaagaatattaactgatgaagtgaatcatttaaagaaggactttgtaatttttctgtgggattgtatttcaccagaagtgcttcagttccgttgagtcctgtgtgatgtacttcagcttgtctgtgagctgagctggtctaacacgctaagtgataacagaatggattctgtgttttatgagtcagtcagccagatctcaaagggataacaattaggaaaaatatatataatttatcccagtaaaagaactagcctattgctgaaaaaaagttgtaccctgtattattgctttttttttgtcccacaggtgtgaataaacctggaaagcataaacatttggaagttattgaaatttattgaaaatatagtacaaaactcccacccttcctttgtttccacccaaaatgtagaattattatagttggctgcagtttttcttatatctcagtggtgtaattttcccacaagtaagaaaactgaatgggtagtatctaagaataagaagctattaaatagcaattttacatgcctttatgatgaaatactacagaagatgggaactgtgtgtcgtgaagtcatggaagtcttcaatgactaataaggaaataatctggctgacagcaggtgttctgattaacagagaagttatttcatagcataataaagaatggcatgaagaattatattgtcaaaaaaacctagccagatttttttgagcaaagaggggtatttccacccccgactgcccactgtaagaataagagacgcttattgtaggattgggaaacagtgaaggaaatagaaaccgctaatggtatcactctcctaaggggactactgttatttcctcttaggcactttgtgttcgcatatacatacacaggcatgcccatacctgtgtgtgcatgcgtgcttcatttttcatggtgtgctctgtgtacattttttgcaaggtccaataggccataaatgacaaaaagatactgggaacctgtcattagcactctaaagttgtattctttccaccaggaacctttgccttttaattttagtcatttataatttattctgctcttcatgctttgtcggccctctcacatactggattttaatagtttttccaaagcaggtggtatacagaagttgaaaacattgtatcacttaatctattttatacatgggcccatattaaaaagcaaaaaagtcattcatggtctcaggaagtatcttgagaattcatcagttccatctcctttcctcaaatacaactgctcagatcctctgaaactaaggacctcctgaacacaaaattataaaccacaaatagtgtttaacaccctttgatgtcagcaccttttttcttctgcctaacttcagtaccttatggcacagcttaaccccatttccttttgatttttgttcgttggcgatgaggaacagctggttacctcttttgtaaaaatgaccttttcccaatatacaaacaagatcaaattaccctttaactttctcttcatgttacatttcttcttttcatccttctcttttaccatgaaaagcttgctatgcacaccacatagtgcccagcatatggtctgcattcaataaatgcctattcgactgaataaacttcagtattcattggtaattgctgggtaaataaagcatcaccctccttcctaattaccttctcccattccacccacattcctgtactggtcagtgctactgggaaaggctctgtgtccagctgggagtaggagctaggccattgctgagacagcacttgcaaaggccatttgcaaggacttgatcacatccttacttttcccatcttcagtttatgtctggaggataggaagtgagtagtgaactgaacacagaacagtaggtaacaggtttatctcttttcaactgatatagtactttatagtttacagtgcctttagtgtcttagcaagcatttattgagtgcctactgtgtgctacccagtgggcaagtgctagagcttcaaggttgcttaaagcaacccttgcctttagggagcaacagcctagtagagggcctggaatgtgacaaaaaatcatgacacattgtgataaggtttcctttctttttgagatggagtttcactcttgttgcctaggctggagtgcagtggtgcaatctcagctcactgcaacccccggcccccagattcaagcgattctcctgcctcagcctcctaagtagctgagattacaggtgcacatcaccacacctggctaatttttatatttttagtagagacggggtttcaccatattggttaggctggtcttgaactcctgacctcgagtgatccacctgcctcggcctcccaaagtgctgggattacaggcctgagctaccatgcctggccgtgataaggtgtctaatagaggtgagaccaaggcacaatggtggcagaaaggaacaagcgatcagttctatctgatggtcaggtgaaactccagaaaaggtggttgacttggtctgtagcacagtacctaaaatgtaatttatttaatatggttccattcccctgtcttgaaggtggatactggtcttctgttttggaaatcttattgcaggttgctggctggctaaagcattgaatggcaaggaagaaatgattttagatgtagctgaagagttagaggtcatatcttcgaggacactgaaggagaaataagggttggaagttttttgtttctgttttgagacagggtcttgctttgttacccaggctggagtgcagtggtgtgatcatagctcactgcagccttgacctcctgggcttgtgcgattgttccacttcagcctctcaattagctgggaccacaggagagcaccaccacgcctggctaattttttaaactttttgtagagacaaggtctcaccatgttgcccagactggtctcgaactcatgggctcaagtgatcttcctacctcggcctcccaaattgctgggattataggcgtgaacctccacactggcaagggttggaagttcttatgttagaaaaaaaaaactgacagcaggaggaggatgaatgagaggaaggtaagtcaggaggataagggaaacaggaggctttttgtatagtcgtgcaccatatgatgacattttggtcaataacagaacatatcaaccatggtggtcccatacgattataatggagctagaaaattcctttcacttggtgacgtcgtagctgttgtaatgtcgtagtgcaaatactttatttttcataaatttagggtagcctaagtgtatagtatttataaagtctacagtaggtacagtaatatcctaggtcttcagattcactcactactcactgactcacccagagcaacgtctagtcttgcaagctctgtttatggtaagtgctctatacgcgactactatttttatcttttatatcatatttttaccatacgttttctatgttgaaatgtgtttagatacacaaatacttatcattgtgttacaattgcctaccatattcagtacagtagcatgttgtacacatttgtagcctaggagcaataggctgtaccatatagcctaggtgtgtagtaggttataccatctgggtttgtgtaagtgcattctatgacgtttgcacaatgacagatttctcagattgcatccccttcattatgtgatgcgtgactacattccaagggtgaaaagatggccgctcaagaaaaggctggagaggcagtgggttaagataaggaaaaatttagaaagtaggaggaagattgaacttactttgtcacaaatttatgtggtcacagaaggcactactgcaatgaaccctgtgttcctgggtaggaatcatgtattaactgaacgcgacatgaggttgaaatgattatttgtaaactgttgactgtcagacgtttcagaggggcctgtgaggtatagaggttggcatgattcgttggagacataaatacaagtgtgactttggacacaagtctgaatgaagggtcagtgtaacttttctgtaaaggatcatttcataaatattttaggctttgtggtctctctgcatctgaattctgctattgctgcacagaagttcccatggacagtacatgaatgaatgaatgtggctctgttccaataaaactttatttaaagaaatggacggtgggctggatttgacccggggcaatagttttttgatccctggtctagatgattatcaacaggcgggctctagttgatcatgggagtgtgtgagggggtgtcctgtgtgaatatgtccagacaggcaccccagggaatataaccagcgattgtagagtacaacaaaccagcaaagaaaaatgagataactatcgattggggaaagactaaagtgggagagttttcagtgttagggagggtgcatgtgttgaagtcaactgtcacagacataacctgagtgcagagatgataacccacagtgcttgtgggatttgtgtgttaggaggggagttttagtggagggtggggcagaaggaattttaagagtgaacaagaggcaagaagtgaagacaggagttctaggccgtgtttcctgtgtgttgtcccattcagagatcataactctgcaagggaagaaggcagctatatttacttcacttttaaatatgaggaaacgggtcctcaggaagttaagtgaatagctcaagcctgtgccaaaactcacactcaggtgtttgcaccttatgtttgtgttattttattttattttttactttagccacctggaccccagttaattctcttggtgattctgtaaaatttcaagttaagcaaaccctgtctggtttgaccaagaagagtcacctgttggtttactgatccccagttgagttcacaggtaaaagccacccttatagaagaatccaaaacagactctgtttttgcaaattatcgctttcttttctgtgtgtgtgagacagggtcacactctatcacccaggctggagtgcagtggcacgatcatggctcactggagccttgacctccaggctcaagcagtcctcctacctcagccttcggagtagctgggaccacaggcaaatgccaccacgcctggcttttttatttttattttattattttattttatgtttttgagacggagtctcactctgtctcccaggctggagtgcagtagcgcgatctcagttcactgcaagctccacctcccaggttcatgccattcttctgcctcagcctcccgagtagctgggacttcaggcgcctggccaccatgcctgactaatttttttgtatttttagcagagacggggtttcaccgtgttagccaggatggtctcgatctcctgacctcgtgatccgcccctctcggcctcccaaagtgctgggattacaggcgtgagccaccacacccagccaaactatcactttcagttacagagatcagacaacattttgtgtaaatatgatgcctctttctgagtctgaagaccacgtcgtacattaggcacactggcttggttaatctctgcatcacttcctggttgcagaagtgctattttcatcttaccagtgagaaactccttttagagtgcaagatgctgtccagaggaagtagggggctgggatttaaactccaatgtccccgaggcttctcacaggtagagtaactgtaacataaactgatggcaaattctggaacgcaggtatgacactccctcttgtctcttgttttgatcacattgtctctgctttttttctttttgtgcccccctccccccccacacacttcttctggtagttgctgtagtttaatctttaagaaggttgcaggggtttggaatttgttacatcctgtcttctcattctgaggtctaccaccatggctgggcatgtgaacccagccagtggtaaatgataaaaatatgctgtgattggaaggaggtggagagcgagcagggaacacaggaagcagagagggatttgtggtgaagggtgggaaggggcctgggcctggagggccccaccaatgtgtctgtgtaccctaaacacttctgttttcagctggcttgcttctgctcacagtttctcaatttacatatgtaagaactgcaggcaaaatgactggaatcaagggcacatgccacttggatccttgccagcttttatttcaggctgacaactctttggatgtaatacaagatttatagttgtttgtttcttctaatgaggtggcaaggtaaatctgcatctgttacagctgtttggcacaggatatattgatttattttctaaaagaaacatgaaaacataaaaatttcaaggtctaaaaatagtgtacattattgtgatggtaactgaacttatcagaagtcaacttatccttgttgacttatccttgttacgtaagtccaacttatcttgttgatgagtgtgggtgggaggcacgactgagagatatattgacagtgaagttgagtaaaagctcttccatttctcttgaacttctggagcaggagagtcacatcatgggatttgagcaggggaagaaaatcttctggtgtttctctcaggtgtctgcacaacccgacctcatccagagcctgaactggagtgtcagccttccatggcacatgctaatgcagggcccagggcaccttggcgatgcctttagggaggttccaggaggagctgctgtctgctcatcaggggctttgagtgtatctcacatatcataagtggagcttgttcacctcatgctcttctttgaatgggaaattctgttctctatcattaaactatgcagaatagaaacagtgtggagcagaaaggtttaaagaaggaaacctatggatttttaacttgcttatgtataactaagtcaactgagagaagagagcagtcttaatataacgtagagggaggttttctctttttatttttttagcagaaattttttagcctgttctattgcaaaataaattcaacttgtcttggagaagagccacacagatggaaaatagtggaaagacagttaaaaaaaaaagcttaacataaatggcaaggtaaccacttgtagctttatgttatgaggattggtatgatgtatcctattttatttaaagaggaataaacttaaacttcatgttgatgaagttggcagatgatcctgaatcaggggagatatcaaaaatctggaaggacagaaatattataatctccttcaggagattaaaagtataggcaggaaataacaaaatgagatacagcttggaaaatgcacactaatgcggctgggaaaaaataatgtaaaatgcagaacctaagtgaacagaagaaatgtgcaccaaaatgccaaaggcaagcaatatttggatgtatacattgcacaacagtccaccacagtgggctgaccattaggggccacctacattgctcatcctcaatagagaaagagggctgggcgcagtggctcacgcctgtaatcccagcactttgggaggccgagacgggcggatcacaaggtcaggagatcgagaccatcctggctaacacggtgaaaccccatctctattccaaatacaaaaaattagctaggcgtggtggtgggcgcctgtagtcccagcttctcaggaggctgaggcaggagaatggtgtgaacctgggaggtggagcttgcagtgagctgagatcgcgccactgcactccagcctgggggacagagcaaggctctatctcaaaaaaaaaaaaaaaaaaaaagagaaagacatgattatttttgcagaaggatgaacagcagtgtttatttttcatttccaaaatttcaccatttaagagataaggagatggtaagtcagtcattggcagaaagcgacataacaacagggagtgtgggactctatgacaataggaatgatgaatgtctgaactgagacaatgtagcagggtaagtggaaatagtggactgaaatgaaatttaggagggaaaatcaacagagtgaagatccaacaaggaggaaggagaagttgaagatgattctatgtagcttcatggctttatggagtgcatggccattgtcactacccacgagaggcattataggtggaaatgcagatttggcatgaaagataatgaattccatattggttgagttgcttaaattggttggagcttaaaggatgttcagctgataggagttcctagcatgtaaatgaatattaaggtctgactgggttagtgtgtcagctaatttgaagtgttgatgagtgataggaaatttcacataattatgttgtagagacctttagcgtgttatctcaaaaggctgaaaaatgtgagaacctcagacaacttggtgagccaatggaagccaatcatttaaacaggcgtctttagataagactctgcttattcaactttcttaaatatggctacggtattatagataaagctatgtgagtaaccagacatttaaaaacacatattgtttttaagaactatataagaaaataagtatttttcagaaagtgtatgagttctcaaatttagttttatcggaaaaatctttgtttgagaaaattaatttaaaaatcatcaccaattctcaaaaatcatggaaattttgatgagcactggatataagtcctgcattctaaggaagctaagttggaagtcagattgttgcctcatttcttaagacatcgggactgatgatctccctggatagtaattagctgttaatgagcacagtacccagactagaagtgtccctaaaatagctgaaacatacactcgagcaacattttagttgtttgtttgtttgtgtttagacagggacttgcttctgctgcccaggctggagtgcaatggcatgattatggctcactgcagccgcaagctccctggactcaagtaaccctcccacctcagcctcctgaatagctgggtatataggtgcacaccaccacacccagctaatttttaatttttttttttttgtagaggcagggtctcactgtgttgtccaggctgatctggacaagcaatcctcccacctcagcctcccaaggtgctgagattacaggcatgagccaccatatctggccaacattttagatcttaattgaaaacttaggaaagttgaattattgatcttcaactaaaatacaaccttcataaaatgagggctcaacatcacagaatttgggggaagggtgctggacccagaaaattgggttctggggcagtatctgccccttttagatgcatgagctttacaaggctcttgagatacctgagcctgagtctataatgcctgagggcaggtgccactcctccctttgacatcttcgttgtagagtttcaggaggtgcaaatgttcattgatgaaaattccagcaaccttccttacaggtacagtcatgcattacttaatgatggggatacattctgagatattcgtcatcaggaaattttatcattgtgtgaacatcatagagtatacacacacaaacctagatgagatagcctactacacacctggactgtacggaatagcctgttgctcctaggctacaaacctatacgacgttactgttctgaatactgtaggtgattgcaacacagtggtaagtatttgtgtactaaacacatcctaaacatagaaaaggcacagtaaaaatacagcattataatcttatagggccactgtcgtatatgcaaaaacatcgttatggggcacatgactgtaaaagtcaaatgctttcatgtgcatatgaggcatatgagataatatacatatataaagtaaattcttaatgtaggcaaagaccatgtgtctcagacaacaaatgaggggtacacatgtgtttcatcataaagaagttttactacaagttaggggctaactagaaactgagctgtgtgcttctcaaaagttttctacttcctccccctcattattaaagtgtctcagcttattgtcattgtttatatttaattttcagaagggagataaatagtattcagtcattcctaaacatatttgacttaattaatcccccccacacaccccactccacttttctctctctctctctctctctctgtcttttttttttttttttatggtaaatcttttggatcacttgttctgaaggatatgagctgggaactcatgaccagagattctagaaaagatggaggaggcagtgttttgggaaatgacctttggcagtgtaagagaagtttgtcaccccttcgagtctgcagcatatgggatgtgggaggatgtatagaacagacaagtttggtggaggtgctcttatagcacagccctttctgggggagccagcttccaatttggaagggaggggatttattgaagaggtgaaaggtatatgggtgttataagttgtattgtgtccacccaaaattcttatgtcaaagtcctaacctgctagtacctcagcatgtgtgcttgtttaaaactagggtcatttcagatgtattgagatgaggtcattagggtggacctcatcttaatacacctttataaggactggtgtgtccttataaagaggagaaatttggacacaggcacacaggaagaacgtcatgtgaagatgaaggcagaggttgtgcggtgcttctgccaaggaacgccatggaatgctgaagatggcagcaaccaccagaggccgaaagatgtctggagcagattctttttctcagacttcggaaggaatctactctgccaacaccttgatctacacctccggctttcagagctgtgacaataaatttctggtgtggaagccatccagtttatggtgcttggttacagaagccccaggaaactaatacaaggggagatgttagcatggagaattccagcagaattctatcagagtggtggatggtccagtaaagggaaagcgaggaaatcgtgagaattgttccctttgtgggtggtcactaaagtatgggagcagagctgcacttctgcatgtggatttgccggccacatgtttcatttgtaatggtagatgtatcatcaggttctggcatgtgtgggacaggaaacgcctgaaggaattttagacaaatgtgtcctgagatgtccagcagcaccactgaaagagtaccacagtgatttgttctagagctttcaacaagttgatcagtttcatccacttcacctgttgctgggtttttcttaaccttagcaagaacactaattagttatgaaaacctatattgatgaatgaggtgaaggcggtgaggaacatgcatactctctgttagccattgattcattcattagtggactgctctgggaaagagtatttcagattataagaaaagctccaaaatgttgtaggatgtcagttaatcctatgactacatctactacttatgaaagaagtatgtactgtcatttggaacagtataaatgtttaaagtcattaactatcttatattgtgggtctggtttagtaatttttacaaactaacatcttccagtgtgtgccttgatcttgtaggagggaagatattgaaattcagcgtgaattttctttggcaattgcccgattctttttcatttttctgtttataaaccaatttgagtgcagtggattttacttacttaatcctgaaactgtatgcagcatatcttttcttctttggcggctgcttcactgctgttgaaatcagctctcatgcctgcacatggcatctggctcactcaccacccccccgtgtgtatgtgcgcccttctctgtgagccggtggctcagctgcccacaaatgcaagtctgtgggtcagagatggtactgagaagtggaaaactgtgcgtgtgtttgcacatttcatttagactgtacttcccttagtcctttcaaaagaactaaagcggggggaggggagaacttaatttttatacagattgttctgtattttcacaatgagatcatttcagttacatcagtgataaaaataattaggaagtaatagtgggctgataattagattgggagcaacaagatggtgttattgatcctagcccagctgtgtccttattatgagatgttggttagaattctcaatagccactggggtgataggaacctgcctcagacagtgtttgtaataaaaacttgctacaaggcatgttgtgaaattaaaatgcattcatctagagagaaatcctggagtttcttatcgttgctaattagaaacaggttgtattttcagaggaaaggaccttaaatgtattttccgagaatgtttttacggttgcatgacatgacttggggagtacataggggagcactagagcaggggcccagtttttcttttcttttcttttcttttcttttttgagatggagtctcttgctctgtcacccaggctggagtgcagtggcacgatcttggctcactacaacctccgcctcccaggttcaagccgttctcctgcctcagcctcccgagtagctgggactacaggcgcctgccaccacgcccagctaatttttttgtatttttagtagagacggggttttgccatgttggccaggctagtctcaaactcctgacctcaagtgatccacccgcctcggcctcccaaagtgctgggattacaggtgtgagccactgcttggggcctggcttttctgactcggcttaggaatttggaggatgtggctgggatgctcatggcatagaactcagcttgctccttgttttcctgaagctgacatgacaagccccatgcgttatgccgtgagcgtttgatgtcaatgggaagtggcgtgctcagtgacaggagccagcctagactgtaaagtcaacttacaatgaacttatctttatttatgtcctgttttggttccaacgactggacatggacatttgatttggcatcattttcagtattatctcatgaggactcttggaatatttcatttgcttggtctacatctatctaggctctggactatgtatccactctatgatcaaacttggaattttcctgatgcctggggatgggctggagtgtttacaagtggagtaaatatgaattcagccaagatataattgatacaaagagagggtagtatttaaggattgagatgacacttgtatgaatgaaataaaggccaggattggtttctagtgccaatagaactttgattgcttattctttaagtaagattacttttaagcaagcaaacaaaaaccacctgagttttttgaatcatcctctagttcagtttcttaggaatgcagtgccaaaaatggtattttagtaaaagagaaactgtgtcaggatacatcactctgaatgtgacagcatgctaggcaggaggctgactacatcctatcatgttgatggtttatattgttttcaccacactccagatgcctggagctgtgggctgacttctcgttgatctgcagtgagcctctgtaaaaatgttctttaatacccaagaggtaccctgttgcaaataatacttttcagaaaagtctttaaaattcaggtaaaggcaattcattcatatgagttgtttctccagctgaaattggcattctcaatgatgttctcaatgaactgatgataaagccaactcaagacctcccacccccagaaaactcccaaacgcccaaaactgtcgtgaaaagaaggaagtcttgttcatggctctcaggatgtctgtaggaatttgcacactgacatgaacttaaagcaggacagatggatggcaagggctgtgcatctcattggatatttaacttgggaaatgagaacagtgagtctagcacgtaggcaaataaagttctgcagaatgaagctgattaaagaatttgaatttgaacctggaaggacttctatggtcctttctatgtatgtaatggtatttttgtaggtaaatatttgaggttactctgtatagtaggttcaaatgtttgtgaaattgccttagagttagaaaacaattaacccaggttgagtctattatgtttcctgctcatttgtgggaaagctggtgatcccacactgaaaggaaactggaccagcaccttctcttccctggacagacgttattcatgccccagcagcaataacaatgcctcgtctcaagagctaaaaatctgttgattccagctgaagtgtttagagaaaagtgcattgaagactgaaccatataaacaggtcagagtgaaagccaatttttataaccagagtcaaaatcagtgtggaataattcataggtcattcttaattttatgttaaacattgtgctagattatctccatctttttggcccgtgctttcaaaatatccccatgatcaaagcttcttagataggatatgtttccctccattgtggggaaacacagagcctatggtcgttctgtcctgcgagcctctgcttcctctgcaaagtgagagctccttttccttgtgtttcctgacctcatccaagggttttttaattattttctaagggagggtgtcactgtctttggaaagatctaaaatagcaaatttttgttttcctgtatacatataagaaaactggaaggagggatcagtagaaacttaggtctacctcagctacaattcatttatttattcagtagcaataatagaggattcgtgcctgttagagccatagcgcttgagcaggcaaacaggcctcatctgccatgctccttgggctctcatcttcataaggaggacagtattgtgggaaggttagtagagaattcagttttcagtgtcgcatttccaaatttgtgtggtctttccacataagagtttgaaaatataaagggcttcaattcgaactgtttggcagatgtagcaaaaggtatcctgtgggtccttttattcatgtttgtttcatgtcttccacatacctgataactcttacagaacagtacgtgctggagtggaggaggtaagctcagtcatggaggaggggttagacacgtggaggtgtgctaagtagaccaaaagctctgcaaggggtttagcatcgcctggggatacaatgcgtggggaggggtttgtttagggaagaatttcaggatgtcaggatgtgtgctttatagataacaatttcatttaatctttaaaatcccccgaagtatggatcagctccattttacagattaggacagagttgcagtgagtagcccaaagacatgccaacacattgactaaaataacattgaatcaccaagaaatgttcttcagggatgtaaaatgcaccaagtttgactttcctaagctgacgtttttagctggctttgttcagatatttttctacaagtatataagttttgttttattacaaagacatttattgggttttaaaaaattcattcagccaatcattcagaaaatctataagggttaactactgacatttgtagttcattctgatttaggaatcaccatatggtttaaattccaatttgagaaaaaaattactaagtagagatatatttgtatcatcatatttgtttaagctctgggtttccaaaacagtgtatatagatagtattggacattgtgaatgggctagtttaaattaagaacaatttcactcatagcagaaaaattatttttcgatgaaaggagatgataggattttccccccatgctgtttcatgttgaagatatttcagcaaattggtcagagttctgccaaagtattttgaatgttctttagaagtgtttggaatgacctgatttttctcctcaggacacatctgaattttcttaggcttttggaactctttttttgttttaaatgttacataagctctttggttcgagcattgaatgacatgttatgacatttaaggggaaaaaattttataagcattaatcaatgtaagatatttgttgctttttcattcgaccccatccagctttcatcctgatgcacaccatactggaggcatggctgcttgtttaattgtttagtgcagaacgcggtttgatctctttcttgtgctttcagtgctggtaaattaatcaaaagaagttactgctctgctgggcattagcatgggtttagatgtttctgcttcagggcctgttcatcaactaaaatgcttttaagccccaaatggagagtaaacagcgttgctgcggccactttgaggtgagccattacttgtgacccgcttacatttgggaaggggcctgtttgtattagcagttattctggtttgggttatagcattttcaaaatgttttttctcctttttattttagtgtttttagtatttgtaaagagtgccccccatcaccaccatgtatatacacataggcatttcaataacagtatgtggagattaaaatcagtggacatttctatgaagtttgaaaggtgaaatgtgtatcttcaccatggcttgtagtgagaggacagtgaaattataatgccaattgagatagcagatagcagaatagttttgactaacatgaaattgtggatccttaggttgtttttctgtcttccgtgaaataaaagttgacactttctaactcttggcagcaggtgggccaggcatttgggaggcactgcagacgctgaagagaacagacctttgccttgcaggaatcagtccttccaggaagacaggcctggaaatggtgatttctgggcatgggctgagtattctgatgggaagagagtggaggagggggaagtgaagctggcagaggggaaggagggcctgacggagatgggagaagcatcagaggaccccgccaggaaggagacgacactggaggtggtcttcaggatagagctgaagttagccgaggggagtccagatgcgagggagtttgcggtgcaggttttgtctggagaaaagcagagcagtgggaatgtgggtgaggagggggtgtaggcagcagggaatcatgacgcaggcattgtcacatcgatgtcagagcaggaggctgtgctcggtgggggcagtcagaaagccccttgagtgagcagctacagagcttaggctgttcctggggcaagggagatgggaggaatttaagaaagagtgggacagctttgccttaggagcagaccaaggctgcggtgtagacaggcagcagccaactcatgttccttccgattttctttaaaactggaaaggaagttaaaatgggacattctggtcactatagagtagaatgaatgcctgatgataactgtcacattgtctctttagtttctaattgttgacatctaagtttgtttttaaaataattatttggccaggcatggtggcacgtaccactagtcctggctactaaggaggctgagatgggggattgcttcagcccaggagtttgagtccagcctgggcaacatagcaagaccacatctctaaaaaataaaacaaaacaaaacaaaaaaacgaagaagaagaattatttgcatgtatgtgagctcctgtttgtatacgaaacaaccaagttcatctttagaaatcatctgattgtctcaatatttatttacttatttgtgtccctctaaagccacagtaaggagaacttcggtgaagtcctccctgaagggtcactggtccagttcgtgtggaagacaggccggtgtccagaaagcagctcctgacccaggcagagcaggctgcatttctcagagtagtcgctagagttttcaggagaccaaataaaatagtacacatctgtgtgtagttaccaaagccaggaacacgggccctaactgtgggcagtttccctctgctagtgccccctcttccttggttactctcatctgtctctagttttgggccatacactgtgcccacccccacactgaagcagcctccctccccacagctatccccccgattctgactcccacctgcttccatgttgctctgcccggctcccattccgaaggccggtggtttcagcccagctttgggagcaccgtagatactttcagttcagcagggcccttcgccccaccacgtgatgggattctagaaatgagtgtgttcgagtaatagggaggaagtgtggggagcctgggggccctgtcggcaggtacctcatatgtgtagttttggcatcgagtttatacgagcacatgggcatcaaaaagcttgcgaagaaaagtcctcttctgctcgatgtatacaaaacttctgttttgaaagagttgcttggggaaaaaaaaaaggaatctttttggaattacacgtgtagttcactaaagtattcctagtgacaacatagccatgtttaaagcctgagattgtgttgttctctgtccagggtccaacagggaactgaaatcttggaggttttcagcaccacagtgtatcagagcactcacagagagcttgggagtctcaatgacaaaggcgcccgtgggctcacagctagtactgcgtctttggtggacaaaagctccattttcctgataaaatttagcttactgtgcaaatgtgatttatttggtgggtttcctgattctcctacaaggagattctctgtggttatttgaaagtaactaagtcaacctcccataccttggcttactttgaattcaacctcgtcaacagatgccctgagggccccagactgtaataagcagctctgctacagtgcctaccagaagggtaaaggcacagtgcaaagaaatggcaacatcttgttttctaggacttcttcaaataccttgtacttggaaagttatgatggaaatatcctgtaatgtagcatcactgaaatggcttcattttaggcaaggattgtaaagctttaaaattgagtgaaaccttgaagtgtttttattatttatttattttattttatgatttttttttcttttaagagacagggtctcactctatcacccgagcacagtcatggctcactacagcctccaactcctggattcaagcgatcttcctgcctcagcctcctgagtagctgggactacaggcgtgattgccatgactggctaattttaaaattttctgtagagacaaggtctcgctatgttgcccaggctggtcttgaacttttgggctcaagcagtcctcccacctaagcccaggagtttggcctcccaaagtgctgggattaagcctggcctgaattgtatttacactgcttttaataacttatttgctttttctttacaaaagtaatctatgttaataatataagcagaaataataaaatgaaggaataatacacccaaatcagagataaccactttctaaatcattttctcctgaagttttatcactgcatgtatatgtatgtatacatctagtatgtgtctaaaattggatgctactgttacgtgtactgttgtaatttgctttcttcattcaacaataggtagtgagggccaggcacagtggctcaggctcatgcctataatcccagcactttggggggccaaggcaagagagtaccaatgggcatatatattggtgcagtcctacgtaaaggcaatctgaatacaaattttacatgtgcataacttctgaataggcagcttggctatttatcctaagaaatttatcctaagaggccaggcgcagtggctcacgcctgtaatcccaacactttgggaggctgaggcaggtggatcacttggggtcaggagttcaagaccagcctggccaatgtggtgaaaccccatctctactacaaatacaaaaattagccaggagtggtggcatacccctgtagtcctagctacttgggggactgaggcaggagaatcgcttgaacccgggaaaaggttgcagtgagccgagatcatactcttgcactccagccggggcgacagagtgagactctaaaaaaaaagaaagaaatttatcttaagaaagtaaatggataaatagacaaggtcataggcacagtcactagcttattgttcatcagcaggtccttgagagtgcagtagatgtaaaatgtattgttctggaagaatggacatatgctgactgcatggttttttgttttgttttgtgtttagagacagggtctcactatgttgcccaggctggagtgcagtggcagtgcaagcatagctcaatgcagcctctaactcctggccagtgcttgtttgcccacacataagcattatgtgatattagtctactttgttgttgccaaactctgttcaaagtgtttcctctacctcagattctttttggctggttttagttcagcatctctatccatggtctcagaactagctcagggcaaggctcctctgatttttctttctaactctcctccttccctttccttgccaccctctagcgtgtctttgagctatgtgtgatagcaggttttactggggtgatttataaataggtcatctctcccctcttgcactgtggagtactggggggcaccaccagcgctggctgctgtggggtctttgtgccctccctcggtctccttcagcaagctgggcccttaagctcttgtgccaagagaagggacagacagggcagagtggaggagtgggcatggggcgctgctgatcagagaaagggtagcctggtggccaacagcacgtccaagaacactgtatgagcaaaagtggcagggaaatccgggaagtgggagctcacaaaccaagtgctaacacttacagggtgtggttccacagctgccctttggctcgacccacaatcctttatacagccatttctagcttatttccagcccccagctcagtgctgactcatgtgaatgttggccagacgctctggcttgtgtggttattggcttcctctccctttgttgcatacagtcctctgtttgcctttctacagagtacagcaatgcatagctgcaaatttgagaatctcattctagtgcggtaggtcagtccacaaatactctctgagtgccagctccatgccagctattgagatgaacaccaccaggactatgctgggaaaacagcaaacatggtgctggtattgcagggagatcacagagggaaaattatcctcaacctggagggatggcttcttagctcaatgatgtcctttcccagcttctctcttggagatattttgtctttggaactggcagccacatgacagccatgtgttgctccctgattgtggaagggtctcagtatcctgagtgcttggggtgcacccaaaagacaaacaccacttatgtcaaaacgcaggccccagagttaaggaaaagtctgtttctatcactaacatagcatctggaagaaatagaaaatggctatttcctaattactgttaaagtgtattaagccaacatccatgtatgcttttcctctccttcattcactgaaggactttcaaagaaattgcaccccttgcacttagcatggtgtctgtgtgacttagtcaatgagccgttaggcactgcagataccgtttgttcagtcaagatggatagccctgccttatcactgcgtaacgccttggaggccataggctatctctgcacatctcccttaattgcctggtgtatttatgtgggttgactagtttgttgccatctgcatagctgggttgtttaatatatttttctttgttctgctaatgacctgagcttcattacatgctgataaagaatcctaaaatgtacatagaaaactgacgaagaacgaactggccctggccctgaacagaacaggcatgccactatgccggctgcccagactcagcatttgtcgttacaggaaggaatggctttctgtttgcattttaggaaaacttcaccttttaaacatttcaaatggaaaaaaaagtatgcgatttttttttttgaggttttactgatatgagctacaaatagcttcttggaagccagtcagaactctcttttcaataatgttgaaacattttcctttgactggaaattaataccttcaatttagaagaactctagttagaagtttatagcacaaatatagccccatgtaactaagggaatcttggagaattttctgatgtcaaaaaacagagcggtgttagctcattttaaaaaattgttctagtcaaatataaagcaaaaaatcccatttttaatttaatttttataatatttaagaatcatttcagagataaagtacttctgttttttaatatagcaaaagagattattatgatagagaataattatataaattaggattttaggctaagaaaaatggtcttctgttggagtggatggttgtggttttcacttgttagttgtctggtgttattttacataggctttttcaaaatttgttttatgtcaatttctgtcaattttcttagtgaaacactgtttctagacttccacttatactaattgcaccttgattggattatttgctgatttgttttttgggctttttgttgttgttggaggtaagagtaagaggaaaaactacttccagcacatgaatggaaaagaatcactttgctgtttgacgttgcttgaggagacaatgtttgtgacagttgcatgtattcgtatgtttgtaatttattcttgtgaacagctgatactgttttagggcatcaggtcaggatgagctaaatgtacagttctaatcaatcaagacaaatgatggtactatcacaattccatctccagaggcaggccctctccactgtagctcccagcttcacccagggacaaagctacagaaagggaggcatactgaccctgccaaagttccttcttcattcctgattcattccatctccaaacccacctgtgtcctgtggccctcctactgcttatcaaaactgttcccattattgctgcaatctgattcacataggcaaaattggcagtagccattgtgtgcaaagcattccgttgaatgtaggggcaatttaaaaatgaagacataatcttttccctgtaggaacttactatcttatttgtgttattcatattcagtgagtaataatttcagtgtgaatatgtaatataatataataggttgatatataaagaaaccccaggccgagcacggtggctcatgcctgtaatcccagaactttgagaggctgaggtgggcaaatcatgaggtcaggagtttgagaccagcctggccaacatggtgaaaccccctctctactaaaaatacaaaaaaattagctgggcatggtggcgggcatgtataatcccagctacttgggaggctgatgtaggagaatcaattgaacctgggaggtggacgttgcaggcagccaagatcacaccactgcactccaaccccagatgacagtgcaagactccgtctcaaaaaaaaacccatatagaatttgacacatagacagtggacttgaagggaagggagataaattcaaacaggggacacgtcagccaagactttcttctcttcttggttctcttcccacctctgtcctgaagaccttgagaggccttaaagccaggagctgagaggggaagggcactcccagccagcactagctctcagcctggatggtgtcctcacagaggcagggggatggtgctccaggatagcatgcagcagcagctcctactccaggtgtagcagccaggataggttttttcacctttcatccatctttatcatttattcagttttccatggttatcttgtgaagcagatggcaatggcggtgtccccatattataagcagaaaactgtgaattggaggattaggtaactgttggattcttttttttttttttttttgagacagggtcttgctctttcgtccaggctggagtgaagtggtgtggttgtggctcctctgctggattcttacagtgttgggagcggaagctgtggtacctgtgttctgtctcccacccacggcccagttgctcagcagaattatgtgaaagcttccaaatgtgtgttttgaagaaatcaaagaatgtaacagagtaggtgagggtgtggagcctggagcaagaagacacttgcttgtgtttagtcttgtcttggccacttcttaggttgtgacctcgggcatactgtgtcaatctttccgagctgggttttctcacctgtaaaatggagagaataacagcaccaattttgcagagttgtgcttaggattacagcagccaatgcgtggaaagcacttagcccagttactgatgatcaaatggtatgtgcgaaatcagcacttgctgctgccctatcattattattactgaatcccatatttttgttttcaacttaaaagcataggctttggcttaaggaacattagaaatcctcctcattggtctcttcacagaggaggaaaaagaggaccagggagggggtctgtctggttaagaagaggcagggagcccctgtacagcccatcccttgaatcctgctcgctcagcgcattcgttccccacccttccccctcattaatatgttcacacattgccaacgcctgagttcttttctccttccccacagcatacactaaacctctagggagacaatacacctactctccaggagatggagtggtgggaggagggaggaattttccaaatagcccacaggatcatgaaggcttttcctcacatgttggtttttatcacctcggaccattggtcacagaatctggtctggaccttgtgccactgtgggaggatggccataggagaaaaagaaaaagcatcgctccctgtggctccagtggacacacgcgtgctttcctcacctttctatcaccagagccccaagacctagcatgcacttgccactgtgccctggaagctgagtcactctcatctaagtggatggcaggtcattttgttacatggtttggggaaaagattacaacaccaaagttgtcactactttaaattctatccatgtgccagttcagtgtaacgatatactatgtgtgtgtgtgtgtgtgtgtgtgcacacgcacttagaagagagggtgttctctgccaagctgcttgctactccactgccttaacctctctctctatcacactcagtcgcagttgggttgatgactcccatattcggctgagaagtgagtgtaattgtaaggcacaggcatgatatttcaagacctttacagcatgagaagtaaaatccttttctcagtcagctgagagcccctgttatatgtgttcctgacccccaaacccctcatttctcaagtttcatggctggaactttcttcattctcaactccccctttggtaccctcccaatccaggcggttgtgtgtctggctcactctggcctttatctcctttctgagctcagtgactagctctattctgaaggcacagggtcctgctggctccatgctgcagcttccagcccaggtgagtgaggcagttgttggaggtattgaccccacccatgaagccaccacaatgccatacttgatgtttaggttgccgctgttaacctccaaaaggagataacctgataaacatggctgtcctcatgttaatttactctttactgaatagctaccaggtggagtcaaaagttgggatttggcttctctgaacaggggatgtaataaactcatagccttaatctttcaccccttttgatcaaaaactgcaagatgatcattactcatttcatatgataagtgtgtccttgaacatgaaatggaaacaattgaggaggagaaagaaaaaagagctgtgttttaagtccaaaaaaccattgcaaaaacatgggcaattaagcaaatatttgtttattacctattgtgtatgatgctaaaggtctaaagaggagtaaaacaagtccctaacaccaagtagcttgtagcctaattatggagacagaagcacatagccaaccacatttcagatcagactttgtccaaggaagtgctattatgatggtattaatcaattagaaaagcaagttgcaaaataacctttacattagattatgtcaactactattataattagttataaaaatgtgtttcttctatggatacacaatgtcttggggctcatgtcctctctataggcaggcccccatgtacctatattcatccacctgccaccaccaccacatctatctgaaatccgtttgtccatcttttctctgccattcaccaggacattagcagacatatagaatcactggaagtcattttcatgttccatttttggaatggtagaatgccactcctgtttttttaaaacagttttacacatataaccatgaaaaagtaaagcattattatttcccgctattgagatctagaataagtggcttgttaaacagtctttgggttttagaaggtgtgtatgctacttggaagaaagagctttgtgtaaattccctcctttcccacccaagaaattccacttccaaattaagaaagagagagaaagagagagagaaaggaaagaaggaaggggggagagagagaaagggaaagaaagagaaagaggaagagagaagtattaatctgcaaactacctgcctgagtgtgaagcacacatggtgttggccattgctgtccctgtggctctggggtctcttaattgcttggattaggactgaggtgaaggtcagaactggatagcctacccactatttccagagtgcaggaagttacagtttggtgtagatatgggattggtaatcagatgaccttttgttctgtgcacaggtgatgggtgaagggcagacctaattaaaaccatccaatatattaagcatctccgttgtcattaattttcagccgtgcatgagctcacgatgcctggtcctgcaggagtcacaagtttgctctgaaatgtcaaaactcaaacacttctcagctttcctctcagttctgattcctattcccaccttccccacagcagaggtcaggcacactattttgaaatactagtaaaatgtgcagtggggaacaatacatgtatgttaactttgaggaagccagacgctcctgagagggtcttgggggccttaataaagcatttcaaggaagcagagtatcaaattaatgctttttgtgctaaaaacattaaggtatttagatgtgttattctaatccctgtttcagcatgggaacagaaggatctaatatcttttatttaaatcccagccttcctagactgctccattcttttcagtctagtacaggaagagacagactataaccggttgatttcagtgactataaaactgtatataattcacaacatacaacccattcaacttttacatgaaatgcgcttgcccagatcttaatacattccacatcatttagtagagatgtcaggttttcagaagctagactcctgtcagaacgccactttaattgttctgtttttgtggacatgcgataaaattgtcacagacgcaagtaccgatgcataaattctgaacccccaagcaaagtatccttatttcaaagtgagccctttctcagttgtggagtaaaccgatcttgagcagacagggtgtcctcctgtttttctgagagcccctctgcaagtctcagctgcagaggcagcatttatggcttgagtacaggatcgagttttaagggttttgttcagttaataaagaatatcaagttgccctcaccactaacaactgtaggatagctgacctgtaactcctgtttcaaagaagacaatgctcataggatgttgaagcagtcaccagtcatcatgtagtaattaagatcagtaaaatatatgtagagagagatggccatatatatgcctcatgtctaaatcaattgttatggcttcttccctttaaaaatttttggttttcaaggacattattagagcctgaaatcagaatttagacgccatataaaggtatcttcaggtaaacagaatagctagtcttaaaattctttatatttgaggacttaacatccaacgtaagaggtgcagtacactttaagacactagcaagatttttttcaaggtcttttaaaaggacttgtagaagaaccaagactatattttgtgtgtatatgttgggaggtgcatataacactgaaataattaaaattaaacttcctatcattattaaatattgaaaatgagttaaatgaaccctttacacaacaaggaaattattagtaaatgttaatgtattttttgcagtagcatattaacatacataatattttctaaaagctctctctttatttgtggagtgtgaagaagagctcaaattctgtttttgaaagttgagttataaagaatctcttttggaatatggaaacatttaaccttagtatttttgagaaatgatacttataccctgttaaataatttttgtacttatacaatgctgtggaaatttcaagctttccacaatttaatatatgctcaaatatatgtgttaaattcctaaaattaccatggaattgcagcactaagataaaaagcaagatgcttgcacagctgcctgcctctcccctcacctttgcagagactcctggtgttgtgaccttagcacctgttcaactgcagtgtcactgaaaggaaaggacctatgcctggtattgccaaaatatggtggatgttatcaaaacatacatgtttcagccataccaaaataataccgtcagtacatctgggctcttacattacttgttcaacaaatcctggagcgtgttgacctgtatttctcaagagtggctggatagcatcagggtttgtcattaagtcatgcatgttttatcaccaataatgagatatacgtttgtcatattagtcagtcagcaagttaaatccttattctactgggcactgtgttaaatagtcatttgtagtgcaaagatattacagaggcattctgttgtggtggaatctgattctaggcttaaatcattgcacaaagagcaaataggtggttgagctaagctgggcaaagtgatgcacacctgcggcctcagctgcttgggaggctgcggcaggaggatcgcttgagaccaggagttcaagaccagcatgggcaacataaggagatcctgtctcaaaaaaagtatatgtatataaaatataatatatattagcacagtatatatatatacacacacatatgataaggtatatatataccttatatattatttattaaatataaataatttgtttggatgatttgtatcatgcagcacccccaagactacttgtaaatgtttggtaagctggtatttattaagccttcaaagtgcttttgtgaggtgttatgcaggggctgggggtgagcttttaatagttgaagcattatgatttaaagaggccaggaaaaaaaactaagcttaggtgttagcttttcccaggagagccctttgtaaggacaaagattgttgtcagccatgtgtcattaaaagctgtcacaaggctgggtgtgatggctcatgcctgtaatctcagcactttgggaggtcgaggcaggcagatcacctgaggtcagaagttcaagaccaggctggccaacatggcaaaactctgtctctatgaaaaatacaaaagaaaaaaattagctgggtgtggaggtgcaagcatgtaatcccagctacttgggaggctgaggcaaaaaaattgcttgaacctgggaggcggaggttgcagtgagccaagatcgttccattgcactccagcctgggtgatggagtgagactctgcctccaaaaaaaaaaaaaaaaaaaaaaaaaaaaaaaaagctgtcccagaaggcctagaatgtttttaaggatatttgtagaaagtagaatcaagaccactagcatgttggtcaggaagtttgcaaacgatatctgtctcttgaatcacaggacaagtgggctgtttttatctgctttccatgagtgatgcatttagatctcacagaggtggccagtcatttatgtattcctttcatcctctccatctgtgcataggctttcagaattgcacactaatagcctgctcctaggtctgttgtttatatgaaagttaagatagttttgtttaaatagaactgtattttttttctattacgcttaattatgggtggagatgtagctagtcttggaatcatgattttggtagttagtcaccatttattgaatgtctgctgtacaaatcttaaattagacatttggagaagggtgaggaaagggagggatagaaaagaaatgaaagatgtcatctctgtccttgtgaaggttagagagaaaaacatattcccccatgatggatataaccaattatgttgaatagtttatggaaagaaatgtactgattaaataattttttaaaaagtgaattcttaaaacttttatgtcacctgtctgctctttcatgatgcagctgatggcgttagggaaagaatgttaactcaagtcacatgacattttgtaggaaatcccctcttttatattcagatgtggttttgaaatgtctaaggattccgagaaatgcttccatgggaggggctccataacaccttcatctctagaggaaatactggcataggatttccagaattttttgctgcaaaaacaaccaaagctagaaacgctcatccctgaaagtctgtgcctgtggctcatttaacaatggggtgcacgtagtcactctgaaacccattcgctcatggattgttcttttctctgtcagcactcaccttgcttttcaaaatacgtcccaccttagacccaacccttgtgaggctgcctcttggtcaaacactgcattctttgaaataaaaactgaactgctctcacctttccttcgttgttgcatctctctaaggcacactctcttgcagcttcctcagttacagctcctcgccatgtgtaagtttttatagtgagggagcttttatagtgagggagcacttacatctaccttagaactattgagtgattgagttgaaattttctttctttgtgcctctagataagctaacccacaggtacctattgggctcgcctgaatgcacccccattcctgccactatcctttcccactactgccctcccaaccccaaattctatatctgccactgtgctccaggggccattccaagctgcccaaattatctacttttagaatttagggctacaatgaaatataccaaaatctgggccatgagattaagttttgagggagccgcacagtttggatccgagcacagatgttccagaagggaacgactgtccagaaggcctggacacctgggttgtgtcctgcacaaatgtactaaatgcatctgaagaaagaacacagtagacagaagggatgtggtcagccatggaggcatttaataaataggattggttaattaattttaggttttagactcaaatatcacatgtttgtatatctatctaattaagctatgagatttttaaaggtactgaagtttttgactgactgccatgaaaaagaagatgttatattttatttaaataactatttcaataagaaaatccttttcataggatagtattttcaacaggaaaatgaacacttttccaattgaaatcttctgatatattggagcactttattttatagttaaatattatgtattttaggcttggtattgataagttggtttctgtgtcattacgaaaaacaacttatgaagtcttgtttgttgtatttcggttagtttttgcccctaccaccttcttatttgagacactcagattaaaagaatatttttaatgaaataccaataaaatgtatactttctgggtttctgtttaaaagcaaagaagaaaaacctacatatgcaaaactttaagaaaggggataagattcagtgtttcttgtaattgttaactgtcactatggaaattttgtatgtatcttatgctatggaaattcaagcttagctagaaaacatttttactagaaagaacctgtggtattgtctaggccagtgctggtgacttgagtatggtccagagacaagcagcagcggcagcagccgggagcttgttagaaatgcgcattcacaggcccagcccaggctttctgatcagaggctgtaccttgacaatccctctgggtgattccgatgctcacttaaagttggaaactcattgatctaggacagtggttttcaaacttccttttagtcataaggactgctacatgtaataaagatgttttcaaatccagatagtgaaagaattttgtgagtctggttaattaatatgtgttttgggtctctagggggttcctgggtggagttccttgtaacccctctggctcaagtgagctcagtgtacaaatctacaatcgagatccagcccctctttgacaaccaggcaggtaagatcggaggaggtaaagaatctgcttaggtttgttcagatgatattgcaagatcagaatcagaaactctgagagcagggtttatgtatatcagataaattagtgtatgatcactagttctataaaagcagttagccaaggtttcactaaagtgttatatttgaaataatgttagagagctagtttttaaatttcagggacatgtgtcccataaaatgagatactccaggaactgatttttgtaagtctcaaaagaaaaacttatttttcattttagaatctattatgttatccaaaaaagcagatagaatacttctccagtcaactgaatgcttttggtttatatttctattcataatacaccaaaataggattaaagaagtgcccccaagcacctagcttgggtcagctgtggtctggggtttttattttataggttgaattattatatgttgggaatacttattaagtgtggcatgtgattccaggtcacaagttaagattaagaaacagccggcttgtgcttcctggcaacttggtatactaaaatactgcatatggctaaagtggagtggtgcctcttcatttctgtagaaattagctgttggacatctgttttgaacccctaatgtgtgctagaattatgttttctcaaggcattacagctgagggcataataaatccttgatgagaatttcatgctcctaaaatactaccgtatgacttgctttatataccctggtcaggttttctccttatttttgctttttgggaaaggcagctgttggatgttcatagattgtactttaagccattggaatcctcacttgacttacttgagatccaaatcccagagtggcaagcccagtgagtctatttgacttgctcctcatttcccattggttggcctatcgctaacctccctaacaaaaaaccaacaactttaacctcaaaaaaaacccgggtctgtttaggtccttccctgttccactcctgagattttccgacccctgcagtgtgaagtggccaagcctttgcctgtgggcttcctttctctccagaccaccttgaatttgctgatggagaggccagctttcttgatcagttgggtgacatacggacttaaggaggagtcgcagcctcaggcctgctgagtcctgtttaagttcctgttttacgctctcttgtgatactttcatggatgcataagaggagttgcagattaagtgatggcctccttagtgaggttccacctcagtgaatgaatgattttaattaaagagtgattaatataatcataagaatccagactgtagatccactatgtcctcagtgtctcagcaattcctttgcacagcccttagaccaaaaggaaaacttaagtttctaattattaagtaggtaaagtcaaataatttaagaagtatttatgacccaacaacttagcagacatttgaaacaataatgtcattgaaagacatacattgaaagaaataatccttatttcctccatcattaaataatcattactgttgacaatggcatgtggtgatgtacctgtttacctgttgagcgctgcacgacttctcgaactttagggtaagcatagctgctgccttgctcatttcctattccacattgattttcacaaggcatttgctttttatcatcaccgccacgagagctcagcttcacaacgacatatcatgaaaagggatgcagtgtgatttattgttgaaactgtgagctacttccagctagtattttgcactgttacctgagagacattgctgtatttccctcaaaaattaaaaaaatttctgctgcagcatccccagggcacctgcacacccagttgggaaccacaagtctgatggcatgcattactcagaggtgtccagtcttgttttgtttttccaacagttaagatgtttcacataatcctatgctaggtggagtgtgagatgcaattgttttatacttgctagtcaacacagtggtttcacattaatacatcacaaccatcccatgaggtggctggttctcattttcctgatcccactcatgaaaagcaggggctcatggacttcctttccctgcttaaatggtcagtgtgtggtgcacaggaaaatgtcatactcaggcctttaactgtggctcccaggttgttttctccaactatatttgatctgtggttctgtggagtttcaaaacaaaatgggaaatcacttttgtgtagccagttacagttgtggactgcctctgccaaaaagatcagcccttggctttaagtagcagttgcacaaactaggcgggaatagatacagcttaatatcccttcatgttaaaattgcttatgtggagttgactagaggcttcattgataagcagtgttaaagctccagtaactttcttttaggccacattaaagtgaatctggcatctgctacaagggagatggtgattctgttctattctgctctcagttgcctaaaagattatacttggaggctatcttttaagttctgaagcatgcctattaaataatggttgaagaacctgagaatatttagcaagcagcaacagagctttgggaggaaagatgtgatagctgtttttatatttcagccttccatatatttgtaagagaagttagacttttcctatttagccccaaatgacagagttagtactcttaagtatgctcagtaacaacaaaaaagtaataataatttgcagtggtcgcacctactgcaggaggcatcgaattgctgccattgcaaacccttgtgaaaatgctaaaagggatatcagattgtgcaacccagctcctaaagtcctttcattatgtttttctaactttctaatttttatctttgtcactgagcaaaggctttttacatggttctacattcagtttgctgtctcgccaaatgcatttctttctcaagttggtagaatgagatgtcaggtagcacttcagttttctgtttggaacaggtatctttgtgggtagagaccatctaggagctgttgaagttcttactgggcaaatctttgagtgtccattctagctgatgcgtgaagtccatatgtgggcgtggccagtagacctctgtgaaatccagaaaaatcttttactttgtgtttattctgtgtgtgtggtggcgtggggcgggggtggtgggggggcaagtgctgtttaagtgatccaaaagcttacctgtaaatcccgcaaatcaagcatcagcttaccaattcagaatgtagagtcactcagtcctgagatgctagtctttgcttcgtgttgctgtgttttgtggtctacactctgaataagcacttcattatcatgaatacccctctgctttagaccccacagatttatactggctcctcttcccagacgacttgaggacttaggaaagcttggccgccatcttggattccttgtggaaagaacccttcctatgcaggggctgatcttcttgccccctttagggctgtgcttctgcatggctcaacaaggggagacttccactccctgactcccatcctagatcctctgccttggctgcccttcaaacacagcttcattttctggggcggatgtagggaagtcttttttctttgctcttaccccagccttctttctgcactttatcatgccctgccaatttcctttcccttctgtaaaagcagattttacagaaaattcccttgccagccctaggttgtatatgatgtaccataaagcaaaaggaggtctgtgctggttttctgatttattggaaagacatttccgaagacccctgtaactagactgacttcctttatcattcagcagggcacacgtacccccgaggagtttgtgcagatgcctcccacttagcagagtgattacaaataggctgtgttttaagttagttttctgttgtatatttcatctgagaagttggcaaatacttgaaagccacaagctactgttttctgaaagcttctttgcacatgagcataaaatggatgtattgaatttggagatcgtccagtaactgtccttttaatgcagcggaatgtagattacagctgtttcctctggaaagacatgcatagctctgatttccctctcttttctcacagagtgtctcctctgcagaagtctgagatagtggatgtggtgaagaagcgggtgaaggccatcaccctcgccatcggagacggcgccaacgatgtcgggatgatccagacagcccacgtgggtgtgggaatcagtgggaatgaaggcatgcaggccaccaacaactcggattacgccatcgcacaggtcagcagcttgggcgtccagctgccctgtcctgttgagagatgatagctgggcatgaggacctggcgtttaaccttcagtgcatctccaaacctctgccacccctcttgaggttgctgtctagatgaaaccccggggatatttggaattctctgtagttgtgatcttgtgcagtttggaggccctgtcctgctgattggatttctctggccagctatggggttggccaagctgctctgtgatccaggcaaggtgctgctcctggcagataggtctctgatcttgctaataataacctctcaccttcagcttctgcatctgctgcatggctttttctgctgcattgcctgctgaagcacagctgtgctcatgacagcctttctctataatcctgttccagtctcactcctcccaaaggtgttgggacaccccctggctaggtgcttaaggtcagggagaagcagtgatttacagctgtcgccttctctgtagttatgagaggggtgctgtccaggaccacccctgtgaggtgaattgccaagagcacgagctgggtttgggccataatgacccccatggtcagtagcaatcagcctcctgcagttaggccaagttcagtccagcggaggctgatccgagcctcgcatgccagggctcctgatgtgctgtactgcactggtggcctgaggatgaaagaaaggtccactccgtaatgatagcccaaaggtgaaggaagatagccaatttcctaacccgtagggtgcatatctgagaccacctttgcaaaattatgactgagacagtggaagagatctaacttaaccgactccatcttgcttctaacctccaagctgtccttgttcatttctgggcgtaagctgaactaactttgagagaaactcagtttatactttatagtttaaacaaagatggtaacagccctttcccaaagcagacctccttgcctggggactagactaacattagccacaggatttgaaatatggcttaggagtcatgcagctggaggctacgagattctgaccttcttaaactgctcctaagatcagtgcttgagatattttgcagaccctgcacttgatggatcagctggcaccactcagatcaataaactggctcatctaatcttgtggctccccaccacccaggaactgactgagctcaagaagacagctttgactccctatgatttcttccctgactgatcagcattcccggctcactggctacccccacccaccaagttatccttaaaaactctgctccccgaatgcttggggagactgatttgagtaataataaaactccagtctccctcacagccggctctgcatgaattactctttctctactgcagttcttctgtcttgatgaatcggctctgtctaggcagtgggcaaggtgaatcccttgggcggttacatatctagatgatttggcctgctggatcacccagaaaacctagacatcacagcgaatgcagggcctgtccctctgtctccagattgcgatacatcatgaatagatgcctgctcatcggctgggtagcaggaattcccttgtgtttctacggtgttgaggtgtttgaagaatgtgttcaccttaatcacatgaacacaaggaaaaatggctacacaccccttcaacctgaaatcaggtgctgcatataaaatgtgaaggagcttcctatagccccagggcttcaggccagtcctttgcagttctggggctccacctctccaaagcgggggctctgtgttagatcacctctcaggtttcttctcagctcacagttctgcagatgcagggagaaattacaaaatcctcctggctctgaaaagtgcatgcaatcaatcttcttcctttgctgatttcaaataaatcctcaagataatttctgaagtaggtaagagaaggaatcttgactttataggtgggaaaaccggggttccttcgtatcaggtgacttacatcaggtccaagcaagcaagcatcttggggtcagaaaacaacggacctgagtgtgaacttgggggccggccccacgcacacctgcctgtttactttcctgagtcaaatgctttgaggcctgtgggactcgcacttcctgtagtctgtcagcaactatagatgttatacaccccagcattattaaatacttgagttataacatcatatggctggaagggatcttaagaggtttcctaggagttccaggcaaatatttgtctgtctttttctttaaaatgtctagggaagggagatcccatgacctgctttactggaactgcataggaataggatgtgttatccagagcaattgctctcttcaaattaaaagtgtcaaagaagggtggagcagggagcgaggctttaaaacgccattgggggttttcttgcccctccagcatcatagtcacttctgccaaaggaactgatgcagcccacatgtttctgtgcaccctcatttctcctgtccatggtcctattgccgattaggtggggatgctgttacttcagggcaggttcctgctaacctcataacctttgcaccaaccaacatgctgcctctaccttagtcaccatgccagaaaagccacagcttgatgaatttctttgcctctcttgaaatggtaaacatctctggttgtttatcgccttgggctttatctgttcattttaatgtggatgcattttttttattacgcttcggaggaagtaccctcagggttattatactcagaaagaaaaaaatgttagctcaaagacttaccttgggaaagttacgaagtgggcaaagctctggttctatttcttccctgcctaccttgtgcttttatgcacatgggcagcccaagaccgagcgccgtcctttttcagctgccttgtcctgagcaaccttgctgccgtcgctgagtcatggtgctcccctagcccttggctttccattctcctcgggagaatcattcctgccccctgccctcctaatgttttcagaacgacctcatgatgacagcattttgatttagaatatacatttttttttcctgaaaacaaatcactgtagtgctcaagttgaggcattcaggatgactcaagcagatgttttctgtgcccattgaagtttaacatcagggggtcccggtcaaatacaaacttcctttttatttgtttagctagttattttatgatttcccattcccctttggaatccttaatgagcctttatggggagttttatttttccatgtgcacctacttctgccacttcgaagcgatgatttagattccgaatgcgtggtgagccccgcgccttcccctcacctcctggaagaacatgctgagctgggactccacctaggatggagtcctttctttagtgctaatggagattattatgcagtttcctcctgaaaattttttgtttaagtattgtattttcagtctggtcatttcttttctattgagagttacatttaattaattaattaattaattaattaatttatttatttattattttttttattcagagtttcactcatgttgcccaggctggagtgcagtggctggatctcggctcactgcagcctccgcctccgcctcctgggttcaagtgattgtcctgcctcagcctcctgagtagctgggattacaggcacccaacaccacgtctgactactttttggatttttagcagagacggcgtttcaccacgttggccagactggtcttgaactcctggccttaggtgatctgcccgccttggcctcccaaagtgctgggattacaggtgtgagccactgtgcccagctgagagttacgtttaatttccaaagtcatctgaaattaataagaagtatataactgcaaaagaatttctaatgtcctgggcattctcaatacagcctgcttgtctctcctagtagtgtaataggtttcaagcttgtggacttactgacactctgacttagaacaggaggcattaaggttttcatgcaagggaactaagagggaactcaaatccagtgtaaggcatatcaaatgtgtagaaacgtgatgtaaacagggttgcagctaacggcacatttatgccagagcaggacaccacgcaccagaccagagaaactcgtttccctccctccagcgcaaggtttacactttttgggacctttatgaaacggcacacagaaggcaaagccaggctaaggggtggctgaggagatacgatctgagtggtgtccagagaccccctcccccagtgaggattcctgaatgttactggattatctatggctccaactcaaaccacaggagccatcacatcactcccagcttgggacccaccagcagcccctgactgcatagcactctggccagaggggctctgtactggttggaggcaaaaaaggagaagacaaaatgggtcaagaagtggaggcaaagtgtgtgtgtgtcttagtatatctatgtgtacatgtgtatttgtatgagtatctatgtatgtgtgtctgtgtgtatgtgtgtctctgtgtatctctgtcctgtgtgccactatctctgtgtctaggtgtgtgtgtctgcctgtatgtgtctgtttatctgtgcctgttatgtgtctctgtgtatctatgtgtgtacatccgtgtgtgtctatatgtgtgtgtaactttttaaactacgcagttgttagtggaagtagtgtatgtgcacctgtgtgtacttttcttttaaacaagactgtattgtgtgagtgtccctgtcccttgctctttttgtcactgaaaaaatctgtgtttgcttagagatatctgacttccactgtacttttctttcagtttagtagctcacctttgtttaataattaatccctattgcagcactattcataatagcaaagacatggaatcaacccaaatgtccatccgtgctagactggataaagaaaatgcaatacacatacaccatggaatactatgcagccataaaaaggaatgagatcatatcctttgcagagacttggatggagctggaaaccattatcctcagcaaactaacacaggaacagaaaaccaaacaccacatgtcctcacttataagtgggagctgaacaatgagaacacatggacacagggaggggaacaccacacactggggcctgttggggaggcagggggagggagggcatcagattaaatactaatgcatccagaccttgaaacctaggtgacgggttgataactgcagcaaaccatcatggcaaatgtttacttatgtaataaaccttcacatcctgcacatgtatcctggaacttaaaattcaattacaaaaaagcatttgtttaaatagaatttcataagaataacaattaggagtccagcagtatgtttagggaaaataataataatgtagtttcaagaaggattttacttgttctcactgggcctgaaagctctgtcttcagagaatggttttctgagattcctgcggaatctggtttcctctacctacattatctgacttctgttcataaggacattctgtttgtgacttttattcctcaatgatgggctcttctgagctttgtaattttcctttttcagttttcctacttagagaagcttctgttggttcatggagcctggagctacaaccgggtgaccaagtgcatcttgtactgcttctataagaacgtggtcctgtatattattgaggtaagaaggggtattttttttccttgaagagaaagttcttttaagaggatatcttgaggtatttaaagtcatttcaaggcaggattttgttcatgtaaaattaaaagatgctgctgtgactttctacagcctgggtcacatgtaagctcctgtgaagctgggctcgccattctggtctagatcctcatgctggatgaccaaagcgggcatctgcagcctttcttacctacccggacatgccttcctcctagctctcctcctgtgttcctctttgccatgcctcttcctctgtgtccttggctggggtagaatcttgctaatactcacagcccttccacaggggtcagatcctatcagcagaggcctacaccttgccaggtgatcgctgaggtgttgctggaatgaacaagggggcctgatttctgccttatttctcacagactctgcaagtttcctagcatccattcactgcttctgggatacttggacactggtacttacgtgggaagggtgtgggagtgaggggatagtggggagtaaaacagcaaggtcattgacaatattgcagtgagttcatattctgttgtcagacaattttccaagatgctgattcagttaccagtaaaacaaacgtgcctgctagaggggtgggcccaggaagaaatggaaaagtcacttcatgtttgctattagtgggattacagccctgctataaagggggtggcttttgaggccatcatgactaatcgtttccaactatgtttgtctatggaggaaggcaatgttaattatggtgttttaatgcttcattctactatgggttattttatatctgatttcttgactcttagtaaaaataataagcaaggaagaaatcaactttttctgatgtaagctctgacaatactgggttcaaataactattaataacaagtgccttgctaaggtagctgtaactaactacttctttacctggttgtctaatctttcctactcaatcattcaggtcaaacatataagttcatgtcacacatctggtaactaaactactaaagagtgatttccccaagttgtgcaggttgttcatggcccaagacaaccgggccaaaagagtaaatgaagcagaaacataacctgtgctacttcattcatctcttcagctgcccggagcccaactggaaacagcaatgcatttttctaagttgcacaagggccagcctattcgccaagacgtgtgcacttgcagagaggatgcctcttctagttcacacaaaagccccttgtgggctggggagcagccctgattcttaaggaatgttccaagcaatcaaaagggatctggttaaagtcctgaaactgacccattcttcctaatttgaatcttttgtgggaggtgccctgtctgcttaagtgtatttccctaggaagaaaatacacagcagaggcttgagagatttggtgatataattgacgttttattcagtatagtgaggttaaaatcaataatttaaaaaattattcacaatttgtctgctggtcttgtgctgtaatattcaactcagttcactctgggtgagaacttgtagatattggtgtaagaactttagtggtttctctcttctcttatttttacaattcccttttggcacttaaaggtgtttgtccccctcctgctcctacatttttctgtgtctgtggtaggagtcactcctcaacgtcactcaaggtcatggacgatagtgtaaagaggtatcgtagggtcacggaccatcgtgtaaaagggtattagaatctctgtttcttcgtgctatcccaggcttcccagcattttgtgctcctgtagctgctggctttcacggtttcttaataatctcgttttcttcacaatcagcaaattacagatagtctagacttcttatcaagacattctgcgtggagctcccaatctttcacttttcagatcgtcccctagggccccttcttagtcatttacacctactatcttgctggtgtttttttttttacttcaagtgggctgagtctgagaagagtgcaattttagtctgcctgaaaaattctatttggaaggaggccctgaaagtgccacatgcgtgcctcaaattaatatatttcaattgtagctgagcagcagttgttaaatggtcttttgtaaacagccttttaaacattctttataaagttaaagaaaatgttaaagtctgcaccactccatgcccaattttctatttagtatttctcggggatattaatttgaaaaccaagaaagcaaaatccttgaccgagcctatatggttagagccttgactcaggcagagcctacctaccactgccaaattacttctttcgcatcaacatgcacttcaaatatagttttaaaaataggaaagtactacttacttgcatgcaattttagtgtgttgtgaactgtaagatcaaagattattgtaagttgatttgcttatttgcaaagaatacttttttgttctaaaggtaacccttataattaattacttaagtaagaataaattaaatacattacttatttatcttaaatggttttcttgtaactcaaggagcgattctttacaatagccaatatgttgtcatctcagatgccctctaagatacataactactaatcacttaaaaatgtagtctaaaggcaatttggcaaattaaaaaaaaatacacatgtgtgcatgcacacacacattttatggccttagccattattatgaggatcattataggacttgaattgccaataaagattgtagggaagaactgtaagcctgtgatgtaatgcagtctactcacttggcatactaacctataaaagtggatttttctgtgtaaggaacacatggatgtattcatgttgctatatggaacactaactgaaagttccctccactctcgcccccaaacctccttccgtattatctgtcctgacctttttctctgtaggtatggagatatttatatatacaaacaaatcaaggattttagataaatgccatcatgctgtgcagagccttctgcaactcatttcacctgacagtgtattctggagaccattcccagttactatgtatagacccagggcatgccatttcacaggggggtttcctgcaatctattcagccattccctgcactgataaacattccacttctctccagtttcaacccccaaaagccttgtggaataacagctttctcactagcccataaatattccacccaaatgatattgatctaattagaccatttttaccacagttccttgaacataacacatgcttacgtatttttatttatacaacaacaagttatttgttgctgacaaatcttaattaatgcttgttgagtgtgccgcataaaattcaagccaaaataactattggtttgagggatttaaaaactaggaacaaaattatgcaatacatggtttcatgttagccctattaataggtaaaactgaaaatactacaacctgtgcctccatcctccctgcagctgccttaatttagtactgttttctgggttgattacaaaaaccgctagtttcacttccttgaccatctccgctgtagctaggatacgatttctgaaacatacgtctgatcaattccagtgtctggcacaatgtctggaatggaggtgcttgaaaatgctggcaatgaaagagtgatgaatgctgctgcttcctgcagccccttcccaggctccctgtgccttctgatgaaatgcccatctccgtcccgtcacctgcccctctgcgatctgggttccaactgtcaccagcctcctctgccactgtatcctccttactttatttgtaatcagtgttactcaagtatgattgatgtacagcaagataaacactttttaagtgttccattctatgaattaaaactgggtttttatcattagaaacacactgaggattttgtctgtctcccatagacggtgaccagaatgtctcagagagctctggagacaaacagatggtggtgatggttgcacaaggctgggcactggaactgcagtgcaagtgtgaacatgggaccacacacttaaaaatggctatggtggcagactttgttatctatattgtacaatcattttaagatgctaaaaaaaaaaaaaagagaaaaatgtcacaaacacttggctgctttcatcgccttgagagagacaaaaatgtataaggacagattgtatgctttggcgagcttattgaaggtttgaaaaacaaattttacccatagttttgttttgcattaaactaattaaatgctatgtttcatggtcgtggccagatggaccatatttctcagaaggtaaaatcctgttgttgtctagaatgctcagagcttcagagccttgcagggcagccagctgggagtggggttggggtgggtggggcaggggggcggtgtgtattccctgtgtgtctgcactgggggtgggaatgggatgaaattagcaaaagcaaggagatagagcagggtaaagatatgtgagtgaccagggaagggcatctgaatggctcagtcggagtagtattgccattggaagctgggattcctttttttttcttctctttttgcaatagtcaaattacatagtaaatgtgatttaggaaaatttgtctatcaatatgtagggcagatggcaagcagagaacttacatgtaattttgtagttttaagcctggggcatagatcatgccattatgtaactatctctccatgtaatttagaagcagaaagcaaagactgatttttaaaactctttgatgttgacaatgggaggaatttgccttaaatgtaaagattaggggtaaagaggttaggaaaggattcctataaatttttgaagtcttgactgacctctgtgtggtatctcctaaggagagggattgaataagttctttaaagctcctacactatttaacaaactatgagttagttgttcagggttttcttaatagagtacagtttcaaagcacagcagcatcagcattttaagcatgtattaggtggcatatgcatttgtttgtggactttctgaacctctgggaaaaggttatttggaatagataacatttttagtggccataaaattcaaatagaaaaataatagggacattacttgaacttaacctatatttcgaaaaattatcatagggatctcttgtaaactttggtataacataaggaagatatgccaaattatttttgaaatagagatgagtctgaaatcataatggtgattagttggtggttcctaatacaaagaataaccataacatatgtatattgatgtgaaaaagtggatattatatacagcttggagtctacttatttttggcaacacatacaagaaattttagtgttttcttgggggtgattaaactgataggggataaaggccaggaaatgagatgcatatttagcaggaaggtctggaaatactatcactgaaatagaaatagatattctaagaccacagcaatttggggaccaaatgaaactgaaccgcagaatttagttgacagctgtttaaaaatttgtcaatatctgacaagcctaaaacaagcaaacaaacctttattatactgcagcagagattcccaacctttctggcaccagacactggtttcagggaagacagtttttccacagagggcatggctttgggatgattcaagcacagtacatttatcattagatcctcataaggagcgtgcaaactagatcccttgcatgcgtgttttacaatagggttcatactcctgtgagaatctaatgctgccactgatctgacaggaggcggagcttaggcaatattgcccgctagccctccgctcacctcctgctatgtggtcgggtttgcaacagccaccgaccagcaccagtccagtccgtggcccaggggttggggatccctgtactacaggatatgagaaaaggccttactggcagtttgttttctgtgtcttcgaattctcacgcctgtaatcccagcactttgggaggccgaggtgggtggatcacgaggtcaggagatcgagaccatcctggctaacatggtgaaaccccgtctctactaaaaaaacacaaaaaattagctgggcatggtggcaggtgcctgtagtcccagctactcgggaggctgaggcaggagaatgacgtgaacctgggaggcggaacttgcagtgagcggaagccgagatcgtgccactgcactccagcctgggtgacagagtgagactgcgtctcaaaaaaaaaagtgaaatgaattatggttcatgtataaattgccattttaatccaaaacgttttcagtagatgaatactttgattttttaaaattgttttgcaaacatatatttccttttgctgttttacagctttatttttttctgttggacctgtgagagattttgttttatcatcaattttttattattgtttgaaaataatcattatttttcaaacttttttttgtttgttttttgagatggagtctcactctgtcacccaggctggaatgcagtagtgcagtgttggctcactgcaacctccgccttccaggttcaagcgattctcctacctcagcctcccaagtaactggaattacaggagtgcaccaccacactcagctaatattttttgtatttttagtagagacaagttttcaccgtgttggacaggctggtctcaaactcctgacctcaagtgatccacccgcctcggcctcctgagctgttgagattactacaggcgtgacccctttgcccgaccttcaaacattgttagaaaaaaatcatatctaaattaccccttctttccattattatgtcattagcttcttgtttggggagccttaattaaatatgttaatgcacggagatgctatgcacttggtcaaccctattacaaattggtatctatgtcctactagtaacccatgcttcattataaatgataaaagaagtcactggctttgggctggatttcattttaaatgttagaatcaacagagagtagatgttttaaaccatgatcaaaatttcatccagtgacttttcccctcttgcatataatgcatgacttaactatacctcaaaacaatgtgtttcgtttgggggacacaagaaatttcattacacggtaaaagataaaatcctaatagctaagctttcctcttctgtcctgtgcatctgccttggcagagttagctttatgtttcctgttacagcttttatttgaaggaatagattggcagctatgagtgcggtgttaaaatgttaataagtaaaaggcaaatttaaaaatatcattgacatatggacctttctgtaaaggctgtggcttcatcaagtatggaaccatccattttctattaaaagctttaataagtgttgaccacctactccaaggcaggcagaatgctgagactgaggtactgggacatgctgcacagagttccccatctaatacaggttggggaagaggtgagtacagtcatcccttagtatccacagggtactggttccaggatacaccctccccaccttcagatgccaaaatttgtggatactcaagtcccttatataaaatagtgtagtatttgcatataatctatgcacatcctcttgtatactttacatcatctataaattacttaaatacctaatgcattgtaaatgctatgtaaatagttgttacactgcatcagttttgttttgttttgttttgtttttttgagacggagtttcactcttgttgccaggctggagtgcaatggcgtgatctcgactcactgcaagctccgcctcctgggttcacttgattctcttgcctcagcctcccgagtagctgggattacaggcacgtgccaccgcacctggctaattttttgtatttttaggagagacagggtttcaccatgttggccaggctgatctcgaactcctgacctcaggtgatccacatgcctcagcctcccaaagtgctgggattacaggcgttagccacctcttctggcccagtttttaaatatgtactattttttattcttgtattgatatttttactgtttttctttcctgaatatttttttttcctgtggttgtttgaatctgtggagacggagagcctggctgtacagcgtaagtgctctgatggctgtgtgcacaaagacctctgcatgcacaggcctggtgccaaccccatcccaagagcatctgggcttacagtccatgattacctgggtggtccctatcttgtgctgacaattgttgagtaataactgcaactgtaatatgttggtgggaaaactacttagagaagtttcccattggacaattgaaaaatgggaattaactagaaatgtaaacattctgaattctgctttccttgcctcatgcatgctcattctccaagtcaagaactcttgggtcatggggacaagaggaacaggacagtccctcctcttggaatcaaatagagaatgcagataagaattcccacaattataatatggtgtggtggggctggcttagaggaagacagcttgcaatgagaactgttagaagtggtgctttacaggcgtggtagggtaagggcctcaggatcccaggatgaaacgagttaagacctgaaggatgagtagcagctgatcaggtgaaggggtgggaggagagggtcagggaatgtgccaaagagagcccagcacctgcctttcccatccatgttctctgtctgttccagctctgtgataaatgtcagcaattagcccagcccttagtacctaacagagaagaaatgcattatgctgcggttttatatttcagtcggaagatggctggagaactagttaaacacgtgcctaggaatgttctctgaaaggccagctggttgctgctggttgatagagctgggagtttattggcaaaaggtggagagggggtgagaggacagggaagaggtaggtattaagccagagaaatactagcagtctggagggattccctacaagatacacaatcactttgaactttataaaaatagactcttactgccctttccatgtgacaatctatgctttttttatgatgtttttgcagctgccctacctaaaaggatcattataaagatccagcactaaaaaaatgtttttaggcattgatggtttaaaaatggagtctttggaactctataaaatgttttaatctccttggaataaaaaaaaaatgcaagtccagaaacagagcccatgcaaagaacttccagggctcacgtgaactttgagaggtcagccctgtgctggagctgtgcttcgtagcccgggtgcactctcccaccctacctgttactgtggcagaagtgatgagaatccagcccacttcacctcacgaattccaatttgcttcccttccttaaaggcctcttgcattcagagacagcacccacatagtttagtactgattgcaggcaaggggtgaatgttacttttatttttccaaattggttatgacttccctaagggcaaataatccattgactacatttcagtagaggcacacacgtaagaatcttttggacattttggtttttgggttttgtttgtttttttagaatgtaagagaagatttcctaagtagcatattatttgtatttccttttaggaaatgcttttcttatccaactgaaatctttcccggtgtaattttcatgcagagaactatacccttcaagtactagaagatacatttctttttttttcttttgtttgagaaggagtctcgcgctgtcacccaggctggagtgcaatggcgtgatctcagctcactgcaacctctgcctcctgggttcaagcgattctcctgcctcagcctcctgagtggctgggattacaggtgcatgccaccacgcccggctaatttttgttttttaatagagatggggtttcaccatgttggtcaggctggtctcaaactcctagcctcatgatctgcctgcctcggcctcccaaagtgccgggattacaggcatgagccacacgtggcctacatttctattatattgtgtttaaccctatcttttgaaagaataaagaataattttggctgggtgtggtggctcatgcctgtaatcccagcactttgggaggctgaggtgggcagatcacctgaggtcaggagttcaagaccagcctggccaacatggtgaaaccctgtctgtactaaaaatacaaaaagttaaccggacatgggggcacacacctgtaatctcagctactcgggaggctgaggcaggagaatcacttgaacccatgaggcagaggctgcaataagctgagagtgagactccttctcaaaaaataataataataataattttgattgaattctttaaacacatttctaccttaatagaacttctattttggctgaaattctcaaagagcctttcattcttatgtagttgactttaccaattaggtttttccttgctaagttttcttttcattttagtttgtgttgctctcatttttttctttctgttctttcttttgccagtagagacatagttgtctaaaacttttgaaatcagatttcgtttaagttttagaactacttctgtgacaatgtctgagcacagagccactgatcgtgcctttctattcatttttctctctctatacccaaatagcaccattctaactggatttcagtaataactgctttagggtgatagaaagcccaagatcaagaatggagacttcatgtataggctgtagaaaagtcagtgggccaacagaaagagcaccttctgtagcaaatgaggaagaagataaaggaaggaggacacgggaattcgtgacgtatcactaccatgatggaaaatgatcctcatgtttgacaatcatacatttgcttgtagaggatcaagagcaggatatgttcccttctgctccttttctctaagctggtcagccttaggtgtgagatgtagattttgaccctcggttttaaaacacccttatgtatgcaagtaaaatgtaattatttatgagaatgcaattcgtcattttttttcttggacttgggagtttgttgccttttacctttagttgaaatagcttctatttaaaagtatcacatcaggaaactcatctctcttctggtaaatgtctgtactttcaagtggtaaataatctccattgcgttctaacgatacatctgagctgcgatattggttttccagcagatgtcctaagagtttagaatgcccttaacttctcagttccaatgtcctggcagatcaagtggactatttaaagatggatcaagaataggagtgatatacacgccttcttgcctggtttttcaaacagagagaaggcaaagtagattcatcctattaaatactacatgtgcctcaagagcatgtcagtgaaatattgatcaaaatattgtcctcttttacccaggaattataggatgaagtttatttttattcgtttaattaaactgcatgttgttttaataatcttttttgtcagtcccttgcccatttgaaagttgcttttcttaacatgaactgttaactagaagctttttacttccctgttagttccaccttagaggttgcctttattctactgaaagtgcttatttgtatagtatattattttattttttaaaaataaggtataatttacacggagtaaaattaaccctttttaatgcacaattctatgattttttttttttttttttttgagacagagtttcactctggttgcccaggctggagtgcagtggtggatctcagctcactgcaacctctgcctcctgggtttaagcgattctcctgcctcagcctccccagtagctgggattacaggtgtccaccaccatacccggctaattttttaaaaaattatctttagtaggtcactcaggacttgcttagaaacggggttttgccattttggctaggcttgtctcaaactcttggcctcaagtgatccacctgccttggcctcccaaagtgctgggattacaggcatgagccaccgtccccagccatagtactatgactcttgacaaacacataaaccagtgccatcaccaggaagtgggcttgcttcctactacacccagataagaacagtatgacactggctccaaaaattccccagtctcctctgtagttaacccctgtccccctcaggggactcagttcctggcaacagctggtctgttttctgacctatagttttgcatttctcagaatgctgtatgaatggaattgtacagtattatgaccctctgattccaatttcttctactcaatataatgcatctgagattcatccatgtcgttggatcagtaatttattgcttttattgctgagtggtattccattgcatgggtgtttcacagtttattcattcacctgttgaaggacatttgggccgtttcctaattttggtgattatgaataatgcctctgtacacactcattttaggttttagtgtaaaggtagtttccattttacttggcaaataccttaaaaaatggggatcagtttcatttccttattcagcgttgctgcatggacttatttgcctctcctcctcactttggttacatgtgggaaaagtcaagcaaaaacttggcccaggggcctctggttccataacaccattggccgggcctctctgcctcagggcctctccggcataggtttcccatggttggggagtcctggaagtccagctttggggtctgggaaccagggaaccagggatcagaaagtcactggactccagggactatatcatagtttaaagaagggcttgagtaaaatgtgaccagaatagcattgacagtaatcaagcaagacgatggtagaagacggaggagttggcctggtgaccaatgcctgccagccctttctgcgcagaagaaatgccaggacccacagacatggctttccctggaaccactcctctgttggtggtctcactggtgcctgccgctagcagagagcagcatggttacaggtgaggccccgcacccaggccagctgtgggacctagtttccagctcaagccgtgaaaacttggctgcacctcctgacccatctcagcctcattatcctttcctgtaaagtgaggaaaatagaagtacatacatcaaaaagtttatgagggtgaagtaaaatcatacaggacaacctttagcaaagtgccgaccacagagtgagccttcctctttgccatttgcagtattttaaggtatttaacatcgatagaccatacaattatggcattgttaagagctggaagctcttctagtctgttgttccccaaccacagggttttcctatatgagtttacttcatccccacaaaccttctgatgcatgtccttctgttttcctcactttatagaagaagacactgaggccgagaggggttagaaggtgtgcccacgtttgcatggcttgagctagaagccctgtcttccaggtggcctggctgcaaccctcctaatccagaatcttccccacaacagcatggcagtcactgatgctctcctggaaaccttctggggaaggggctaagtcttcccttgctctaccttaaagacagctctaccttaaacatggctgttatatattgcaactatatatcattaccatagagcaaaatcaccatgattacatctgttagattaactcttgagtgggcttgcttcctgtttgtgcattcagaataattggtgcgctaagaatcaattgtatttcagcagtgtggtcaccagtttacaactgagaaatcattctctgcacatcatctgtggcctcatcttctcccctgacccaaattggtatttatagatttcattaattagcctagaatcccagaagctcagatgctttgcttgagttacatgaagagcaggtaaatgaaacatgaaaactgatgtacttgtttctttaaaactcatgccccagggtgttgagaaactcagattctaaacagaaatagtgaacgctggttgaattgaggatggatgtgtggtccatggtatttcaaaatcatagatatatagatcttttaaatgacaataatgttaactgtgtcaatgcttggaaataatggaattatgcttggaattaagttaaaattcagtataaaataatagcatatgcagtcactacaatttgtaaaatattaaggatcagaagacaaaacacaataatgtaattaacttgtttcgaattttgtaaaatgattttattgcaaagttagctaaaaataaaactctagtgtttaaacaaaacaaaaccaaaaaaccccactactgataaacaacctcagcaaagtctcaggatataaattcattgtacaaaaatcactagcattcctatacaccaacaacagtcaagtcaagagtcaaatcgggaaaacaatgtcattcacaaatgccacaaaaagaattaagtacttaggtaactagggaggtgaaaggcctctacagtgagaaatacaaaacgctgctcaaaaaaatcagagatgacacaaacaaatggaaaaacattccatgttcatggataggaagaatcagtaaaatggccatagtgcccaaagcaatttatagattctatgctattcctgtcaaacgacaagtgacattcttcatagtactagaaaaaacttttaaaattcatatgaaacaaaaagaaatgagccccaatagccaaggcaatcctaagcaaaaagagcgaagctggatgcatcagtgttacctgacttcaaactatgctgcagggctacagtaacccaaacagcatggtactggtacaaaaacaggcacaaagaccaagggaacagaatagagaacccagaaataagaccacatacctacaaccatctgatcttccacaaagctggcaaaagaaatggagaaaggactcactattctataaatggtgctgggataactggttagtcatatgcagaagattgaaactgtaccattccttacatcatatacaaaaatcaactcaagatggattaaagatttaaatgtaaaacccaaagctataaaaaccctgaaagataacccaggcaataccattctggacataggaatgggtaaagatttcatgatgaagatggcaaaagcaattgcaacaaaagcaaaaattgacaaatgggatctaactaaactaaagacctctgcacagcaaaagaacctatctacagagtaaatagacaacctacagaacaggaaaaaatgtttgcaagctatataggtccaaaggtctaatatctagcatctataaggaacttagacaaatttacaggaaaaaaagaacaaccccattaaaaagtgggtaggctgggcgcagtggctcatgcttgtaattccagcactttgggaggcaggcagattgcttgagcccaggagtttgagaccagcctgggaaacatggcaaaaccctgtctctatagaaaaaaaaaaaagtccaaaaattagctgggcatggtggtgcatgcccatagtcccagccacttgggaggctgaggtgggaggatcgcttgagcctgagaggttgaggtgtggtgagctgtgattgcaacattgtactccagcctgggcaacaaagtgagaccttgtctcaaaaaaaaaaaaaaaataagcaaagaacataaacagacacttttcaaaagaagacatacacagtggccaacaagcatacaaaataaagctcaacatcacagatcattagagaaatgaaaaatcaaaatgacagtgaaataccatctgacaccagtcagaatggctattattaaaaagtcaaaaaataacagatgttggcgaggtggtggagaaaaaggaatgcttatacactgttggtgggagtgtaattagttcaaccattgtggaaaaacagtgtgatgatttcccaaagacctaaaaacagaaccaccatttggccaaccaatcccattactggatggatacatacccaaaggaatataaatcattctgttataaagacatatgcatgcatatgttcattgcagcacaattcacaatagcaaaggcatggaatcaacccaaatgcccatcaatgatagactggataaagaaaatgtggtacatatacaccatgggatactatgcagccataaagagaacgagatcatgtcctttgcaagaccatggatggagctggaggccattatcgttggcaaactaacataggaacagaaaactaaataccacatgttctcagttagcaggagctaaatgataagaacatacagacacaaagaagggaataacacacactggggcctattggagggtggaggatgggagtagggagaggatcaggaaaaataactaatgggtactaggcttaatacctgggtgatataatctgtacaacaaaccaccatgacacaagtttacctatgtaacaaacctgcacatgtatccccgaacttaaacacacacacacatacacacacacacacacacacacacacacacacacacacactccagctactcctactaagcagtccactctgcctggaagttgctggaaggactccatgcgaaagtggtttctctcctcccagaacatgattttactggtttctttcaaagcctattcatcatcctcccttcaggacactcttaaaatttgccttctgtggagctctttaccataagaacaagcaacaatgacatgttccagcccattagtgttaatatttgttgatccgaagatggaaaatacattttactagacccttgtttccttcttgctgctgagtatattttcaatctataaagcttagataaatttcgtatatgctcacctttttttgtgggagacttgcaagagaaacctaccctaaaagctaacctagccaccttctatttgcagaaataaagcaaaaatcattttagtgttgattttgatgtaccagaacctaaattgcttaaattaaaaactttttagagcagtgtgtagaattctatttgtgtccgtgagtatggctaataactccattttaagaaccagaaaaggaaataaaataagttaaccatctcccttgagctgcaaaagttgctaatcaaaaacttcatgtaaacaatgtaccgatatcagactctggttatgatctgtatacatttagtgtgcaattcaagtataaaggctttcattttttggcagcccagatgcaaacaataaaataatcctgcttatttcctctcagcagcaggttttgtcatccatatgtaactgaccgaacagtgtttagccacaaacagaaaacactttctgcaggtggttagttgtctttaatatgtctcatcaagcctatctgtgtgcttctgtgtgggctgctgtgctcttcaaggcctaggtcaagtgccttggccagttagtggttagataattaatagagactcactaagtatgtattatttaccgactaccactttcctgattgctttgaaactaatgaaatgaacaaaaaatgtaattatggtccttgagggaatttatgatctagttagaagggttaggaaatactttgggcccagacacagtggctcacacctgtaatcccagctctttgggaggctgaggcaggaggattgcttcagcctaggcgttcaagagcagtgttggcaacaaagtgagacctcatctctacaaaaactaaaagaaagaaaaaaaatagccgggggtggtggtatgggcctgtagtcctagctagctccttgggaggctgaggcaggaagactgattaagctcatgaggtcgaggctgcagtgagctatgatcacagcacaacaatgagaccctgtctcaaaaaaaagaaaagaaaaagagagagagagaaagaagaaaggaaggaaagaaggaaggaaggagaggggaggagaggagaggagggataggggagagaggggagggcaggagagaagagaggagaagagaagagaagagaagagcaaaactttggaattgtttcataggagtggtaccttttcccacactgactgtaaaaagttcagagaaacaaagggattttcacagcagtgcttgcaattccaacatctgccttgtgactttcaattttgagttaatatttgaaactgtcttcgttgcctgcataaagtgatcaagtgaccatcagtacaaagactttttcacatacctgttttaattgctctggagaatgcctgattctctgagttattgcctagaggttttcagagtaaattacaagagtactacatagactttatattaagtcgggtcaccccaaatattttatgaaaacctgcccagccatttctacatgacatggtaacaagcatagagatgaaaattttatttatctagattaggcaaaattctcctatacgctatgtttaatgccatgggttgtctatattttatctttatattgtgcaaatgtgtgtatgtgtattatacacacatgtatgtagaagtacatatgtgtgcacatatatgtgtataattgtatgtacacaagtacatacatacaaatactacatgtactatcaggctttctcaggggagacttagtgttttttttatctttactggaaaaaactgttgttggtaatagcaaagacattttgtgttagccattaacgagatagcagagaaatcctttgctatctaatatgtcacggtgaaggccactggtatgagcttatgttgaaattcaggatttttctgatgtcatgagtgtactcaggtgaccacattttgaatctttttacttttaaaaacaattccccaccccagttctttagctgagattgtcatttgaagacgtgtgccctgttcatccagctgcacatgaccagaaggccctggagaatggtttaagccattttgaagagcacagacatgggggagaaggaggtaatcgtcatcaatacatcatccctacctctttcaaacttctgtatatttttcgtacttggttggtttgtttttgagatggggagaagacagagggaggacagaggctctcaaggagtttgtgagtttagagctggcctgatggccatgagcagcatgttttccatcttgaagaaagaagaggtgggaattcagaatggtgcagctgccttggtaaaaccttacggtggctttatttctacttaccaaatactagaaacaacctatatgtcccttgactgagaagtggataactgtgcagtatacctatgcagtggaatattacttagcaacaaaaaggagcaatacacagaatacagtgctttgctgtgcaaatgcattgtgctacatgaaagaacccagactcaaaaatgacaccctttcgtatgattttgtataaatgcatgattccacttatttgacattctgaaaaagacaaaaactgtggggaccaaaattagatctgtggtttccagggtctttgggtggaggaaaagggtgactacaaaggagcacaaagggtttgggagagtgacagaaatactcggtgtcttgattatggtggttacacaagggtgcgcagttatcaaaactcacaactgtacattaaaaaggatgaataattattgtatgcaaactatatctaaaaataaataagaaacagatatatatattccagtaattgcttcttggtatttgaatcaggccaaggataacatctatcagaaaggtcttttattgatattgaaattctgccccaacgcattccctctcctacacacacacacacacacacacacacacacacacacacacaccttctctctctctctgcctgcccccaccatctcatattttcttgtaatcatttttatgggatttataggatgtccagctcatgcacaagtgtcagcctcttgtttgtaatctcggtagctcagcctcccgagagtgatccagccatccatgactgagttttgattcaagaaacaggactgtgatcaagatattaattctatgcattataaaccagggaacagttggaaaaaaactaaagcttagtctcctttaagactggaaaagttgtactttatatatgcatatgtgaatagtagcagggaattttcttgcattcaattttctcattcctgagaggttagatggttcaaatgtgctggggcagggagggattttcactcggctgtcagagcttcatatccctcactatttttgagttttaagaagatatttaaaatgcttatgtttctatacattacattaacttttaaatatgaatattatagtaaataataaatcataattcacaagtgcaaagaccttctgtgcccatgtttagcatatttggtcgatttcttttccatggcactcaatgacagctgaagaaatttctttaggatgacagattgtcagcacattgacatagattgttttagatgtatatttttagtgggaatgaatgaaatttaagtgagcttttctcagaaatatagtaataaggagaagagttgctatttcatgtgtcaagcttacaggacttttttccccctctttgggttatagtcaacctaattagcaattattaacaagtatcttacaaaataaaaagaaaatttggaatttgctgaaagcatcctaacatctactagaatagcgctattgataagtagtaaagaaatttatctcaaatctcccttgcccaagatagagaaaaattaattaagaatactctagaatttttttctggtcctttattgaacttcattacttaattagtccttagagagaagaaccatcaaaacttggtaggtggtgacagcatttttttacatttatctgtgagatggaactagaatatggagttcacaggacagcatttcactaacatatcttttttttttttttaaaagacagggtcttgctctgtcacccaggctggagtgcagtagcacgatcttggctcactgcaacctccacctcccaggttcaagcaattctcctgcctctgcctccctagtagctgggattacaagcacctgccaccatacccagctaatttttgtatttatagtagagacagggtttcttcatgttggccaggctggtctcaaactctgacctcaggtgatctgcctactttggcctccgaaagtgctgggattacaggcatgagccaccgcgcccggcccataactagttttaaaactatgattacttcatagaatcctggtttcttcagaaaactactttatcaggatgaagggctaattgtgtggttatgacctagttactgctggaagtgctggaaatcattcaataagaaggcaggtgtgtgttgtttattacctccaaacatttgggaccctctcttcactgcataggggccgtgagtactggagttccgaaaggagagtgggacacacatgaaacccattttaatgaaggaatgtccaagctggttccccagatgctgaaattagatggggacctactggggaagagccatttccaaacaggagagaacaggcctagcttcctaaaggactgtctcagatcttcagcactagcccagagggaagtatttctccacactcacttgaaatggccactgtgctacacagagcccttatctggattccttttaaactgcaaagattttaaaggagagatctttatgcttttttaaattccaggtgtattactcattaaatatggacattgtagccaagaacagtgtagttcccatggtagtggaccgtattatattttatttagttcttctatattacttggttttttttaaatctgtgtttggctatttaaaagtttatactttgatcaaatgaataatatctagtatttgatagcacaaccaggtgactatagtcaacagtaatttattgtacatttaaaaataactaaaacagccaggcgccatggctcatgcctataatcccaacactttgggaggctgaggcgggcagatcacctgaggtcaggagtttgagaccagcctggccaacatggaaaccccatctctactaaaaatacaaaaattagctgggcatggtggcacacacctgtaatcccagctgctcgggaggctgaggcaggagaatcgcttgaacccaggagacagaggttgcagtgagccaagatcgcaccattgcactccagcccgggtgacaagagcaaaactccatctcaaaaaataaataaatagctaaaacagtagaattggattgtgtataacacaaagaaaggataaattcttgaggtgatggatacgctatttaccctgaggtaaaatacctatttcaaaatatctcatgtaccccataaatatatacacctaatatgtatccacgaaaactaaaaatttaaaattttattaaaaaataaaataataatttacattttggtaattggttatagtacgttcttaagagaaacaaataaaactttacattaactatttggacttgaaggaaacgatttcatctgcaactatatagactgttaaggcccgtgttcccacttttttaggaatttgatggagaggttgtcttactaccataggttttatttggtttaggtttccttttctatagtatttttacattttaaagggcccaaattgttcatttaatgggatgactgttaatgggtggagtctcccagggccgattagctgtttgaatgcaagtttattactcataatggcactttttttaagtgttaaagttttggtaaacatttcatctgaattcataaaattaaaagtgttgatatttcattataactgaagggagaaattgtatagaattagcagttgattccgtttggactgtgaataattatctatgggaagggtaccctgattaaatctgactatttaagagataagtgaatcttaaattcttaatttacaaaagtttgatctatatccaatgggaatgaatctctttttgtattccatgattaattttttttcaagaattccttaactcccatgttattttccctgtttaattttgcagaggctatgacttcctcaatgcaaggttccttcacccttgagaatctcctggttactaatggccaccatgtgtcacataatgagcttccagactgaaatcagaccaagtttgtttcatttgcactataagaaatggtagttattcttctgtgaagacatatatagaatgagcagtgatgcatataactgaaaatccctcagggaagcatttgttatttgtgaaaagtgtcatctcgttctctaagaacttcctcagctttttctgtttgtttaggggagggcacaggaacatgatggcatggtgttacatttggtgatttggtgcacacaactgtctgtggtcatgcactttgatgtaactcttgtccaactggcctatccaaagtacagatatatcttcttatagatggcttttaaaaaaaagtaaaaagcccatcctcaatagataaaaactattgcaaacaattttaaatccttaataagaaaataatttcaaattgctgtgcattgacagtatttgaaggaggtggggatgttataagggatggtttttagaaagaaagagctgagagacatgaattttgcagtgcagagaacatgagctttagattcaagctccagttgaatgatctttctgtacttcagagtcataattataaaataagatttagttgacctctgcaggtagtagtggcagttaaatgatgcaggggaggcaaagctttacctctatcctcttagggtcctggctgggcctgagaattaaatggacatgacaaattaagccaggcacagtaatcccagctactagggaggctgaggcaggaggattgcttgaggccaggagtttgagaccagcctgggcaacatagtgagacccccatctctaagaaaaaaaaaattgacagaacaaattaacaggagaaaagcacaccaatttatttaatataagttttatgtggcacgggagccctcaaaggaaaataaagattaaaaaaaaaacacagtcagttatttttatatattgaattggacaaacaaagataagttgtaaaatgcaataaggccagcaggcttggcctagggtaggtaattattggagaaggaactaggatgataagggttagttaacaacctttgtgcagatttcccttggattcaaccttctatccttgatgataagaatgctactttccttttggggtaggaaggacatctttcacatgggagtttcacctcctgcctttaagaaacagaacgaaggtcacagtgatcttcttgtgcctgctgttttttaggttcccttaaatcaaaacagccaatatgccagaacatcatatttttaactcctttggtggcatgaatatggagctcctacctgagtctaaacacatgcagccgcttcccagacacggagtcattgccatagatgattatgtgggatctgacagaagtttgttacttgaaaataatttcacacaagtcttccacgttggagggcagctgtgggctgcagaagagcctggagagagtagtccctgtggccttgcctccgtccctgagtgtatttagatgaacaaggacctttcccctgaacatttgtctgcatggatttttaaggactcccttctctggaagctgccctcaaagcatttcaagtgctcttgctgatggcagatgaagctgccgtaaagcagggggatgtgattgagcaaaaaatcttttctctttcaacccagcagagcaaaatagtaactctacttcatgaaaacaaaattggctgtttccaatagagcactcagatcttcaggaaaatgtagcatatttcctaaaggaggttaaaggtgaatgaaacctttgctggtggttccatatattctaccataatcgtaataacaacagcagctcacatttattgggccttttaatgtaccgtccattgctttaagtgttttacacatactgtattcacttatttaatgtccaccaactcctaagtccctgttagatgatcttcattttacgtgaggaagccaaggcacccagaggtgcgatgtaacttgtccacactcaaacagcagcaaagctggcatttaaaccagacatgctgattttagaacactaactgcatatgctgcatctataatgagtaaaaatctataacaggtaaaaatgtacaatggagaatggtgggaaccagtaccaggaacctgtgcagacctggtcagagcaggaaaggaaataaacacagttacatgattataaaacaacaaattggataataagatcagtcctgaaaagtcaaccaaaagatgctcacgccagacattattgcacagtatcttgaatcaggcccagatatctaaaataagcctctttccagtgatttttcaagaatcttgcttattatatagggtgcagcaactcattttgactttaaaggagtagtgtggcaggctcctggacacctggaggcactatatgaatttctgcctaaaaattcatccataggaaggagatttgctgaactgagaaagtgaacatttcacaagaagtacatatgtctccatgctaagaagtaactccctgggcgatcgccgtcatgctgagtgtttccatctccaagccctgctgcagcctgcctccttgtctccacccatgcctggaaaacctaaccctcataaaagtctcagtaagcaacagtgagaataactgtaaggtgttacaggagagatggttttggcagccaaaaagggcttatgatcctaagatccaccttaaaagtgttctgttgcccagttctgtattaattctgagcagaggcagcagaaagcatctttcagggtcgagaatttctgagatcttgaccgtcaggaaaaggatgcttccaggcagccgtggaaactgaaatccgagccctaatcttgctcagagctgctgaggtctgtttgtaggaaaacatcgggttattgtctgaataacatacatccaagttacaacgggaaaagaaatctgccttatggaaagagaatgaacatttgctgggtagagtttatgcctgcctagatgctccacctccaggctctaggtactctacttcggagtgcagtctgcgctccctcttctgggatggctgcggagcccagggcatctctctctaaggctttcaacaagtcttatgggctgtctagactcgctgtcttggaatgagttagtgctctgacctgaggaaaattccccatgtttctcagtgtcaagccaaaatctctagggcttcagtattgccccacggttctggcccgctggccaaacacataactctttttgcagctcatacaggtaaatgtgagccagtgctgctcttacaacctgcctcccacatccctgtctgtgggtggctctctcctgaagatggtacttctccagaagtttccaaatgatcagagaggaactgcttctgggtactcctccttctccttcttcttcttgccagaggccttgaatttgctattgagagatttggcaatatactttgaaacgtgaagataatgaagttgttgggtgtgaacaaatgttacttgactatttaaatattaaaaatatgatatacatggtgtattagtccattctcacactgctaataaagaactgcctgagactgggtaacttacaaaggaaagaggtttaattgactcatagttctgcatggctggggaggcctcaggaaacttacagtcatggtggaaggggaagcatacatgtccttcttcacatggcagcatcaaggagaagtgcagagcaaagtgggggcagaaagccacttataaaaccatcagatctcgggagaactccctcattatcacgagaataacatgtaggtatctgcccccatgattcaattacctcccaccgggtccctcccatgacacgtgaggattatgggaactacaattcaagatgagatttgggtgaggacacagccaaaccatatcacatggtaacctacgttagagattcgttgtatgaatagcagaactttaaaaagttttgccttgcagaaaacagttcctattattgttacaaataagtatacatcatcttagaacttgtctttacaaatatgaacaatgagtaatggcagggaaacaagtggttaagattcagtgattgaggctcagtttctatactggcaactccatggagagcttgaagaccagcagctacattccctgtcttgatcatccgggggtaggaaaagcattgaaagatgggatgactaatgcctgctaaatgctggccaactttaaaaaaaattgactttagtattatgagatacgaatggcatattttaattaggaaatacagtaatcctaagtgagcttcatttcttacacaaaatataggaagatgatacatgttcactgtgcttgagaactttttcctcaaattcaatgcagaaaggcagtctgtgaggcagtaggaaatgcagctgctggaattctgttatcagtatgtgtatcagttctgattgagttgtaaaatagaagcctgatgtgctggatattaatttagcaatagataagtctgaaaatagacttaccttcaatttcatcataaaagtcaacctcccacctaacacgttgaaactcctgtggttgtgaaagaagaaaaatgaagttccacttccctttcattccatgagccccttcagtggttactgcctcactagaggtgcaagttactagaaccgcagaatataaactgttacataaaatgatgaaatatgcgcacagaaaataagggagctttttaaaataaaaactaatttgtatgctttggaaagactcaaaggtgagtttttttttttttaagctaattagatatgggtaagacaactgtgaaaaactggagaattttttttttaaaggcgtgaaggatgtacactcaaattgccttgtaatttttcctttacttaaaaccctgaaaccggacattttctaactgaaatcacattgacactctgtggtatctatgtgtgatggagaatatggagccaggagagcagttcttggatacagaaccacattttggttgaatgactttatgtttatgtattcgtagttaaatgcaatatgtatgtggtcaggtttcatggctttttcaagtgactaactacaggtcttaagtaagtcaggtgacaggattgtaccagatgtaaaaaacgagtttaatataaactcatcaatttgttgaaactgaatatcaaaatgagaacctcagtgtttggggaacagttaaatctacaacatagtaatttagtagaggttcatggagtcaatttaaggaatatcccatgatatgtaaaaatatatatgtatattattaaattgtatatttgtaaagatgtggcccagatataaactttatttacctccagccatataataagtaaatatcacacagattagttgtgcagtccaactctcgtgcgtgtgcacagatcagcctcgggaccaaaatgccacatccctcttccccatatgttagtattgaagttctgccaatccttcaaaaactgactcagatgttaccattacctgaaggctttcctaagttctccacatcaaactgtggttcacttagccaaacctgtttgtcgttaatacgttggaatattacctgctgtttcctgtagctagaagtggtgcttagtactatggttttcggaatcacagtactgaagaggcatctgagaactgtgtatgtgtttgcacacagtactcaatctctagcttttctaaaacgccatctctggcacatttgcttaacttattttaaagagcacacactgaagtagtatgacaagcagcacaagaacttctgttttctgtgttggaagaaataacaaatgattatacacagcaaggacaaagagatgagtttttagagaaaaaagcacattagcaataatattccactggcgaagtcactacctatgcatatcatatattgtatacattggcaaagcattttgtttcaactttgccttttcgttttttccagtatgtataaaatgcttgtcttaattaatagtcattttctgctgggggtggggtaaggaatggccgttttaatgatattaatgtacagtggattcttggctgtgaaggagtgttaccaaatattacagcttgtattaaaagtgtaaagatagaaataagtggtgcctgtttaaaaagctataagatttagaagcctctccgctctgacagggatggtaaagctcattttaattctgaaatgcaacttccatgtgttttacagtttaattttctataattttaaccaattttatataatgagttttgtagctttataagtatattaatctaacaattaaatagagaaaaacaattgtttctacacgtacaggactagaatgtgtggctagtttctctcttattggtacctctacacagtggagctttctgtaaacacattctaaatatagaagtgtctttaaagatgagcttttcctctttttctgttaagacagagcttcctttgggctggcattttgtttactctgaaggggctcctccaggagagacactctgaaccccgtgcattctgggtgccgagctgccgcaggctggtttggggacttctcaacttagtgcgcagaaaaatgaattctgtgaacttaaaatcagagtctctgcccaaggggacttctagcatcaagaaaaggtagaagctagctgaggtttaagaggtttgtgcaggagaaaaatgaggcgttaaatggttaaacactgccagcagatttttagcattgtttaatagttttaaattatggaggtcttaggtccaaaatgtaacagttatccaactcactgacattaaacattcagttgccagcttctgttttcttggtcattaattttcagtctatgtattttcggtgctttgctaagagttttgttaaaataacttttcttgtttgcattctcatttcctacaaattcagactttgctttagaatccaacagatggatacttggagttagcttattttttccatctaccctattttttttccttctaccttttatttaatgaggaggccaggtgtggtggctcacacctgtaatcccagcactttgggaggctggggtggacatatcacttgagcctaggagttcgataccagcctgcgcaacatggcaaaaatctatctctataaaaaatgcaaaaatacaaaattagccaggcatggtggtgcacacctgtattcctagctacttgggaagctaagatcagaggatcacctgagcccagggtggtcaaggctactgtgagccaagatcatgccactgtactccagcctgggcaacagagtaagaccctgtctcaaaaaaaaagaaaaagagtaacaaagtaagatatcttttgtctggttataataaaagctgtagtatgtataatttactcaaaagcagagcttgctttggaaatctctacatgcttgaaatttaaagcagtgcatatatagtctccatatgtattccatactgtaaaccatgatggtgttccagggattgagtctgagtgtttataaaatggcacatggcacttaattttgaaaccgtggaaatatttaaattactgacttgatgaaggctatagatcaatgtaagaacttattagttctcacattgatttggatgcattcaaagatgctaaatgattgccaatatagtttttttttctggactatttaattcatggtaggtatatccagtatgtataagaaagtaaaaaaaatgcaaacactttaatctcaaataacagtatgcagtgctctaatgtaatatcttctactctgaagggcaggtcataagagcaggctcctggtgatgagatgggagatcattcttcatttgttggaagatcaactttatttcatgccctagaaatgcttgctttacaaagaaacatacgtagggcagcatgtatcctgaggtttccaaaagagaaaagatttgttcacaggggtaagttgaggaggcgggagaacagctctcaaatccacctccctgccgataagacttaggaatatttttgggttaggaagtaacaggttcatttgtgcaagcgtatttggggttcttggcacttcatatgacatatatacagaagatggcagctttagcatgatctgtgggtggagttttttggccctctggcttcaaaaggccacctctcaggcatttgcgcaggcccacttgaagggttggtggtctcagctggtttgaagtgaacagcagctggcccaagtttctgaaaaacagctgaagccaacattaccaggaatgtcatctgtaatgcagccagtaatggttaagtttcagtgttctgtggcacggccttcaacttcatggaaaagggacaaaaataacataaagcaagtggccaaaagcaagcagagcaggcagttgtgatcagattaacctcttggtttcactgctatgaacatctgtatacaggttttttgtatagaaataggtattcagttctcttcaatacctagaagtggaattggtgagtcataatgataacgctatctttaacattttgaggaactgttgaactgttttctgaagtggcttcatcattttacattcttaccagcaatgtgctaggttccagtttctccatatcctcaccagcacttgtattgtctgtctttttttactataaccattctgatgggtttgaagtggtatgccattgtggttttggtttccatttccatgatgagtaaggatgttaaacatcttttcatgtggttattagccgtttatatatcatctttggagcaatgtctattcagattctttgcccatttttggattgggttgtctttttattgttgggctataagtgttctttatgtaatctatatacaaatgccaaatcctatatgagatatattatttgtaaatattttatcccattctgtaggttgtcttttcaccttctttatagtgtttttttttttttagcacaaatgtttgtaattttgataaagtctaatttatctgttttttcttttgtcccttatgcttttggtgccttatctaaaaaattactgcctagcccaaggtcaaaaaactttactccattttcttgtaggaattctatagattcagctcttaaacttacgactgttatttattttgagttattgtttgttaatggtgtgaggtagttgtccaacttcattcttttgcatgttgatatatagttgtaccagtaccatttactgaaaagactattctttttcctattgaattgtcttggtaacttgttgaaaatcaattgactaaaacagagaggatttattcctggactctcagttctatcccatttatttatacatctatctgcaaaattattttaataaaaacaaatagtgagcacattaatccagtgtgagtaattcatggatccattactaaatctttgtgaaaaatagagaatggaaaagtatctttaatcctgttactgtaaatgttttgctgtatttcccttgagtagacttagaccatttaattcctttacaacagctattcctacctgtttctttttttaactcactctgctcatgttacttcttttcctgtgcactcgagaagccagaagtaacactgcaaagcacaataacccctaaaatcacttgtctgtctcacacacacaggaagaaaggaataaagggtaaatttccttttaatattttatgttttattgttctttttttctacagtaagctactcatttactgcatctgatactgaggctctacagtagccatgcactttagtctgtctcttaagacacttttggagatattttcatcagtggtttaaatcacaagttgccttaatttaaagacaagaaagagagcattctgaacaaaacataaacattttttagcccaagttcaaactggcttttttgctccccagaacttttttttttttttgagcacagggtcttgctgtgtcacccaagctggaagtgcagtgccacagtcatagctcactgaagctttgacttcttgggctcaagtgattctcccacttcaactttctaggtagttgggactacaggcatgcactaccatgtccagctaaatgtttaaattttttgtagaggccaggcatggtggctcactcttgtaatcccagcactttgggaggccgaggaaggcagatcacttgaggtcaggagtctgagaccagcctgggcaacgtggtgaaatcccatctctactaaaaatacaaaaatttgctgggcatggtggtgcatgcctgtaatcccaactattcgggaggctgaggcaggagaatcacttgaactggggaggcagaggttgcagtgaaccgatatcatgccactgcactccagcctgggtgacagagcaagactccatctcaaaaaaaaaaaaaaattttttttttgtagagttgtctcactgtgtcacccaagctgttctcaaactcctgggctcaacctcccacctcagcctcccaaagtgctggtattacaggcttgaggtactgtgcctggcccccacaaagactttttatacctgaaatacctatttaaagtatatttctacttaaaattttttttcatctttcagatacactttaatacccatgtcttaacttttacaaaccactgtaactttataaacagagattacttgagaagcaaactggcaatccatattttcagagagctgagaggttttccacagagctgaaagagaactaaggaatacaaatctcagaaggaagaattgcgtcctacctaagaggtaggcatgaaggacacatgcactttttgcaaactgtgctgttgaaatttacacgctacatcttcagttgtctgacttggacaatgacactgcttgtatatgaaataatattagcttaaaattattaaacagtgaaatactgcttttaaaagtgaggtgtcttcaaagatgggaacaacagacacaggggcctctgaaatgggagagggagaggccgcaggttagaaaaactacctgttaggtacttgtgttcactatttgggtgacatgatcagtggaagcccaaacctcagcatctcgcagtatacccacgtaacaaacctgtacatgtaccccctgaatctgaaataaaacaaagaataaaaatgaagtgtcttatctaaaatgaaaatctatattgctttgccctttcaaacttaacatgtccaaaagagagctgttgattctttcatctcaacactcgttcttcctgctttgtcttcccctgccctgtcctttcccctccctttgtgatccacccctgctgagcttcccaccttttggcaccacgctcataattccttattatgctccagctgtattgccctctttacttatctgaacaggtggcacttttcttcctctagctgctttgctcccaaatgttctgttcccttttgaaaggttggtgggtctctcctctagctcacaacaccctgtgttcttcagagctctgatgttcttatttgtacgtttccttctgtattacttgtgtcctcactggtccataggtgccttggagacaaggatcctatctgtctttccccctcaatctccagctcctggagtagagcctagtccatagttggtgctccataaatatgtgttcaataaatgatcaagcaggagtgagttataaccagaggtcaaaaccctggggcatcggagaagacatgcatatgtgtcaagtcgtaattaatgtgttgccccagagaggaccatgtcagctgtctgcttcctggggagctggcttctggcagcttcaaccatctaaatacagtcaaggagaaagttgcatcagttccatttgtttttgtttttccattggattttgaaccccaggagaacagttgccataacagctttccttcagcttttggtagtctctaacctccattcaatattgactactgtgggaaaagcactctctctgaacgaggcttcttactgtttctgaatttacccatacttctaatcttattgctaactaatttgtacagaagtctgtttctttagatagtaagttaaagatgagaatttgaatggagactgctgatctcgctataggcccatgcagccagctcctggccacatctcaaggctcagctgaagtggcctttcctcggggaaccctccttcaggtccttggcacattttactgtctttaataaatagcactgactccatttgggatgaaaaaagcaaatatgcagtctgttattgggcccagccccaatttaaacatcttgagggcagagaacatctgtcttttttttttaaggaaaaaaaaaacaaaacactactctatctccaaaacctgatatgtactcaatatttaataaaaataaattgaattaattaatcctttccaaccttacagatatttctgattgatagatccattgtccagcaacaataatatatgactatgtctatcttagtaaataaatttctaaaaagctcaaatactgggacatgaatggctcactgagagcaatagggtgtggagaaagagagagagggagcgagcagagggagctggatgtacacgcagttgcagtcagtcacttgtttcctgagtagactatttgagtttttgaacggttattggtgtgattatgtctatcccatcaaattgttgatgaactttccagttttttttggaaaataaatattaaaggatacaattctgattatgtttatatttcgtttcattttgttttcaacttaccctgtgaatttcgtccatgatgttatggtatcttaagggatgaatctaatacagaattatgcacaatttttgtcatttgcctcccttaaaagaaaaaaaaaatgtccatgactatactaaaagatcctgtcatcttaactaagaggcagctgtttccctggagttttttccctcttaactatatcagctatactgagtgggatgtaatcacatgatttaaaattgataattagtgtgtgaaaggcacttggcaatgaaatacatagcaatatcagtgacataattttggcagcagaaaaatgctaaatataatccaaatgtcaatgtagaaatgaaaacagtactagctagtcaatgatttatataatgtcttgggaaaatgaagtcaattgcatcaaattttaaatcaaaataaaatatactttatttaaaagttatagaagctggaggcgtagtatacgtgtgtgttatgtgtatgtatatacagtgtatggatatatttaatatcattaaaaatgattatccttgccccggttgtacttctcttctattcataaaccctaaagaaaagctctttagatttttcttctagggcaaggcgcaatggctcacacctttaatcacagcactttgggagggcttgaagtgggtggattgtctgagcccaggaatttgagacaagcctaggaacatgatgcaactccatctttacaaaacaaaacaaaacacacaaaaattagccaggcgtggtgacatgttcctatagtctcagctactcagatagctgaagcaggaggatcacttgagcctaggaagttgaagttgcagtaagcaatgattgtgccactgcactccagcctgggtgacagagcaagaccctatctcaaagaaaacccaattgtttcttctggaagttgtcttcatatctctgaatatgtgtgcctattttgcagtatgctaaatttggttcattttagacattatcttttgacttcctgtttcaacaggtgaggatttccctctctacattacagctttgcctcctctccttctcccttcccacatagttacatctctaattttaattaattcagggatccatgataacctctttaaattatgtaaataatgttcattgtagggctaaaaagtatgatttttttttctttcttgttcaggtttcagttttctctgtggtttctaatggcctttctttttgtcttttaccctaactgcatcccacatttgtttaatactctcaagatgtaccattatagtatgtttgtctgagtctcttgtcccccttccccttccttctgaagcaccctctcctccagtccctatctggactgcttgctctctaggctctgcttgctgctggacttcacttctctttgatgctctccaggagggcaccatttcctggattccttgttttctttattcttagtttcctcactcacattcctgaagtatatgtatcaatagattcttactgttacatcagcagtatatttctgagacgttggatagccacaatatctttattctttgattatatttgattggtagattagctgggtataaaattctaggctgaaattctttttctgtcagaatgctatgtgttgtttagcttacttctggttgattggaaactcaatgcaattttgattctccatctttggcatttagattctattttctctttatgtttagtgttctgaaatttacaaagatatgtgtttttgtggatatccttttcttaatgcgctttcaatctaaagactggtttcctttagtctgggaaattttcttctattattttttggtaatatcctcctttgcattttctacattctgtctctctacaacttagtcatatatttaaccttctgggtttacattctaatcttatccttttactgtcttggatatttccgtgacttatcttctaggtcctctattgaggattgggtttttatactctctttttaattttcaagttcttttttatgtctttttttccctacaagcattctgatcttagtttacagatgtaatatcttctcctatctctttgaggatatgaaataaaatttatttaatgttttcttttgttctctcattcatctctgttttctctgtgttctttcttgtgaaaacttctcttaaaagccccaatgggtgtgttcagtctttctttaattagctcttttatttattaattacatcatttaacatccatctagtaatgcaaatattgaaatactgaatggctaatacatttcagatgctagtaaaagtaacatatgttcacagtaatttgaccctgtgataaaatgtgagagtttttttcatggcttatctcttttattttcctttcctggaagaatttccagaaaacaatagaatttctgttgttatgaaaacagtagagaacaaacttgttagcaaatgtagataatgaaaagcactatccatctcctttaaattctgttgtggaaagggattttacactgtgcaaatacaaagaatattgtattttaactatatatttattcatacttggatgataattaagaggaccttccatggaattagctgtggatttcttttccaggtgttcatgattgtgtcatatattcaggttaaatcagacattagcctatttagtgaaattctaatgtatacaagcatctgcagcaataaaatatattttgaggattttactcctcataaaacacattccatgctgtaattatttccttcagcagttgctgattccctatctatattagtattcttaggcttttcagcaggattgaaaaatatttctgttgattgttcagctactgttctgaagtcataaaagtacacttacaatagacaacttgctatatcaatgccttaaaattattttcaataaattatggtattttctgaatattaataatgccataattaagcataaacaataaaatgaccatgatagtagcttgattgctaggaattttttaaggcaatattgcttgttccttctgaaaataaaagctgagagcaaagagaaaggggaaggagaaaggaacaagtattcaagaatggttttccacgtgaaactgtgagctgaatgcaccagcatcatccacctgcagctttctggggcctgggagggacacgtggtgctgactgagaggtggggctcctggtgctgtttcccatttctgtccttgcaggggtcttagtgctaagccttttgcagcagctcctagtgtgggcccttgaggaagctgccacttctgagtgccagaaactgatagccgggattgtggggtctaacagctgggacgaagggccaaggaggagagtgcttttaccatgggcggcacaggttgggctttgtttgtctcatgtcatttttgatctgttggacagacagggctattgagccagcttgacctcttctgtaacctcttccccactgccattctcagcaatggctctggaggaggtcatgcttcctgattgtggccagtcatgtctgatgaagtctctgtcccagaataaatacttacttagggttaaaatagaggagccataaactttaggtaccgtttatgaaatgtattgcaaagtcccttttctttgcttctgtccttgcccttgacctttaagtgttgctgtcgcccagaggcccaccatggatttcctcttgcctccttacataagttcccttgctggagacttccactgctgtggttatagcatatttgccaatgttacaaacatttttcttatcagaaactctcccctgagcatcagccttgtgctgtggattttttcctggagagcccacaggtactgtgccttaaacatacccccaaaatacattcatctaccacttggcgctctccctcccgagcttcacctttggttgtgtttgttgccatctttcctgtctcctatcagaaaatgcctggagtcattctttgctgccaccctatatcaggtccatcagccgggacctctcaggatctttcttcaagactaatcccagctggtctcaaactcctggcctcaagtgatcctcttgtctcagcctcccaagtagctgggattaaaggcatgtaccactgttcctggcccatgtgggattcctgcctctcctgacactccagcctgctcccaaacatttctgtttaggtaattaacaattatctaacaagtaattaacaaatactttcacaagtcagtggttaggttagacttacaaaaactgtcagtgaatcatgctaccccccaccccactaccttgatgtagttgccctgtgttcccagttgctttgagaaagcagattcaagagcagaaagcattcctaaggacagatgaactttccacgagagtccattcgtagtggtccacttccgtggtactctgggccctccctccccacctccctctccagagcccacatttcccagtttacaaaaggaaggaatacatctcacttcttcaagtctttactgtggtgtatgcatcatgatacaaaaaatcttagggatacaaaccaatgagacaacatttagtggaaaaaaaaaaaaagaaaagactgcctatgtttattatatctggaccctgataggatatttatcttctgtcagggagttgagacagtatctattcagctgtacaatacaccctctcaccatacacaatggtcagcgataccttgctcctgagcaaaagtccaaagaaactgccagtgagaaacatgggaggcagctgcctctgatatcgtggagacaccaaggtcatggccagactgttcatcagatccatctgtgtctatgagtggaagctcagaagcaaaagagtcatcatggcatgtttattaacatgtgcattgtagttgaaatatgaaatcagagtctttttttatgatttaactgattggttagaaagtgaagacagaggtgttgtcagagtgtggcaaaaattttccaaaacttgaatgagctaaatctgcaactgtagggtttgaaagagcacttaaggcatgtgacacagtgactgtgatatgttggagagaacctttttcacaaagaatacaatgtgagcaagcttagccctgtgtgataagagaaaactattttatcaaatggcaatgaagtagcaagaggctattacaaatgaaacaattttactttcctcaaactttgctgagtgtactgagtgaaaaaagataaatctaaatgagaccatagcagggataattaaaggtcatttgaaacttcttggtatacctctagatatacttctcagaagttaagaaagtaaatgattcttgtgactaattaacaactattttcactagtcagtggtttctgtttctttgctttttagaaaatttagaaaacgacctaatcacaatgtcagcagatagaagatttcaaataactttgcaatacagcaccatattatttttggcatacggttcagaagaaatctaaagtattgatggctcttgctgtaatgaagctttacattctttttaatgtgtgaactattaatagatttctcaggactgagatctatagaaatgagtaataggaatagaaattaaaacaaaattaagtaagatttccatttaccatttctgtgaagtataacaagtgatcaataaaataaacaaaactacattaaattatggtaaaactatatgtgtcaagtggaatggaaaacgagttcaaggtagaaggaatgatacaaaatttttgactcttcaagaaatccttgtttctattcacactagcaaagacacggaatcaacccaaatgcccatcaatgatagaatgctaaagaaaatgtggtacatatacaccatagaatactgtgcagccatagaaaggaatgagatcatgtcctttgcagggacatggatggaactggaagccattaccctcagcaaactaacgcagaaacagaagaccaaacaccgcatggggagctgaacagtgtgaacacatagacacagggaggggaacaccacacactggggcctgtgggggttggggagggagagcatcaggaaaaatagctaaggcacgctggacttaatgcctaggtaatgggttgacaggtgcagcaaaccaccatagcacatgtttacctatgtaacaaacctgcacatcctgcgcatgtaccccagaccttaaaataaaattaaaaaaaaaagaaagttgcctaagtatacagctaagagtaggagagccaggatgttagccagttggtctgactccagagtaaggtcttcagggcactgcaaagacatcaaggagttcacagtccagtgggagagacaggcaagccagccaggatgatgatgatatgatatgatatgatatgatatgatatgatatgatatatgatggtatgatatgatatggtgatatgatgatgtgatataatatggtgatatgatctgatgatatgatatatgatatggtatgatatatgatatggtatgatatatgatgatacggtatatgataggatatgatgatacgatataatatggcctgtgatgaggctgtgggaacagagaaaggacactgaatggaatcttgtggaggtggggagatcatagaagcatttccagaattgaggttctagccatgtgtccccagtaccctgtgatggttaatgttatatgaactttactgagccatgggatgcccaggtatttggtcaacattattctgggtgtttctgtgaggatgcttttggatgagcttaacatctaaatagggagactgaggacagcagattgccctccctaatgtgggtgggcctcatcccatcagctgagggcctgaagagagcagaagactgaccctcctgtgagtaaaagtcctcctgcctagctgccttcaaactggtacatcagccttttttccctgccttcagactggaactgaaacatcagcttttcctgggtgtccagcttacagaccccctctgcagatcttgggacctgcccacctttctaattgcgtgaatcaattccttataatgaatctcttcatgtgctcacacatacagacacacacacacacacacacacacacacactcattaagtgcttgttaatgtctttttaaaagtgggttgtgatgaatatctgtggtatttagaatccattagccacattaaaaagtgatgtaaatttattttatagttttaatatttataatatgccagaaattatatcttttacaactatttatccttatcattaaaaattttagatgttacctaaatgcaaatatgtagagattgcattgagtctgtagactcaaaatcccagtgacattttttgcaaaaacaggaaaacctattctaagcttcatatggaagcccagtggatccccaaatagccagaacaatctgtttggaggactcaaacattttcctgatttcagaacttactacagagctacagtagtcaaaacagtgttgtgttaccataaagacagatacgtagacccaatggaatagaatagagagcccagaagtaaaccctggaatatgtaattaaatgattttcaacaagagtgccgagagcattcaattaaaaaaaaaaaaaaaaaaaagtcctttcaacgaatgaggctaggaaaactggatatccagatgcaaaataatgaagttggacccttacttaacaccatatgaaaaagataattcaggacagatgcagtggctcacacctgtaattccagcactttgggaggccagggcaggtggatcacttgagccaaggaatttgcgaccagtctgggcaacgtggtgaaatcccatctctaccaaataaaaatacaaaaattagccagttgtagtggcgcattcctgtagtcccagctactcatggggatgaggcgggtgctgaggtgggaggatcacctgagtcctggggaggctgaggctgcagtaggccgtgattataccactgcattccagcctgggcggcagagtgagaccttgtttcaaaaaaaaaaaaattaactccaaatgaatcaaagacctaaacataagacctaaaacaataaaactcttagaagaagacataaggggacagtttcatgacattgaatttggcagtgtttacttgaacgccaaaaatataggcaacaacaccaaaaaatagacaaattggacttcatcaaaattcaacatttttgcccttcaaaagattctatcaacagagtgaaaaggcagcctatggaatgggagaaaatatttgcaaatcatatatccgataagagattaatatccaaaatatctgaagaactcctaaacacaacagcaaaaaaccaattcaaaaatgggcgaaagacttgagtagacatttctccaaagaagatatgcaaatatccaataagcaatgaaaaggtgctcagcatcactgatgattaaggaaatgtaattcaaagctacactgagataccacttcatacccattaggatgtctattatcaatagaaaacaaaaaagagttacagagtatgtagataagttgaaactcttgtgtattgctgctgggaaagtaaaatggtttagccacttgaaagatagtattgctgtacctccacgatattaaacatagaattactatatgatccagcaattctacttctgggtatatatcccagagaattgaaagcaaggactgaacccatgtttttataccactgtttatagcagcattattcacagtagccaaaaagtggaaacaacccaaatatccatgtatgggtgaatgaataaacaaagtatgctatatacatacaatggcatattatttagccttaaaaagaatgaagtcctaatacatgctacaacatggatgaataaaactttatgttaagaaatataagctacacagacaaggacaaatattgcatgatttcatagaggcaaaacagggactgtggggagaggagagttgcttaatactcattaatatagagtttaatggtttaattaataccattaatacagaatttcagtttggagtgatgaaaaagtcctggagatggatgatggtgatgggtacacatcaaggtaaatgtttttaataccactgaactgcacacttgaaaacagttaaaatggtgaattttatgttctgtatgttttaccataccaaaaaggacataaaacatattgagatagtttttgagatttgtagatacatggatctttagatttctcttagggaatgtgtgcacagctgctcatgtatttggagaattcatgtctagtgtccttcacggtctgaatctagccctcttctctcacttcattttccttgttccagccacctggcagctcacacctgctaggcttttgtacaagttgttctctctactttcagtgccccttctccccgcacccagttgctgaatggaatctgatacttcaagacccagcccaagtggccaccacatttggaaaagttgtgctcactcctccagacgtaacctgtttcttcctctcctgtgttcccaaagaacttttctgcacttcagatacgtcccatgcctgtccccaaacagagtgaattgttggacagagatggtgtctcacctttgcaactcctacccatagcacagagcaaaacttgaagcagggccttagtaaacagttcagtaactgaatttttaaaatatatatatgtgattctttccttataaccctccgctgggagagtagacagacctttcgctctactttccaaaaccagaaaatgagacacaaagcaagttcacaccttgcccaggccacaggctcactgtggctgatgggaatagagggatagcatcagaattctcttctgatgatcctagtctgtgcagccaggcactaaatcttactgtcaataagttaagggtgtgactttattggttataaaacacatgttctcaaatatttgccatagatcctgtccataaatgaagtgatcttatacatatttctgctaccccttccataatagaccccctgccactgttccaacaccaggaggttggaaacagctgtgtcattaatgaacgacagcagatcctaaccagtgacctccagatgaaaggctcattatttccttactggtctcaagagctattcagtcccctagcaagccagctcagaatttggactgaagagtctaagccttgaactataaaaaaaatttacgaagtccttgacacaatttggagcgattatgttctattgtgccaagaatttcttattaaaaatcaatttaattgtgcataccccatctggtcggtattatggtcttttatggggggggggggggaacacgattttgtgtttacctgatgttccatagagtaagcatgtagttttgcagaaacagagacattttataacgctgagaaatgagtaattaaagaaaatttttaaatgtttaccagacttctttttactaacttttgtgactttgagctataagattcaactttcttgcgttagttgggattttaacggaaaagaaaatgccagactaaagtaaaaaatgtatgtgtgtacctcatctgctacatttatttccatgtaataatttctattttatactctcgagattaaaattccagtccttttattcttttttctttttctttttttttgttttgttttttgtttttgagatatgatgtcatggagtctgtgcacgatcatggctcactgcagcctcaacctctctggctcaagcaaccttcccacctcaggctcctaggtaactgggactacaggcatgtgccaccatgtccagctaatttttgaaaaaatttttgtagagacagggtctcactctgttgcccaggctgatctcaaactcctgggctcaagcagtcctgctgcctcaacctcccaaagtgctgggattataggtaggagccactgtacccagcctcaagtccttttaaacataacctagatttcccattagtatttaatttgtgttattttttattcaaggaatttggataatgaaagatgagaagattacttctgattgtctgctaggccagtctcaaccatattagcaaaagattgcaatattttcactcaaaatattgccagatatattttaaactggagtggttgcattttgttgtacaaaatggggaagatttttaaagcttgcttttcaaacagcttataccctaatcttaaaaggatcccttggcactcaaggaaaaagatctggataattcataaattttttggtgtgcttatgtgcttatagttgttaagtattttgttcaagtgaccatccttaaagtatcagtaatataataagttagtagcccataaatactgatttgattctgaattgcccttaacttaaaagttttaaaaattacttttaaataagtaggattgactgctagtcgctgcagtctactaaacacctatttgatatgagccataatatctttcatcttctctgtgccccgatttcctcatttgtgaaatggaataacaccttttgttaggattgttaagatatttaaattagataattcatctagagtattgcaaggttcttggaactgagtaagccataaatacactttagcctgtatcatcatcaaaaataacagaaatgactgttctgcagtgtgtggttttcttatttaacatgctcttttagtgagcttttctctttaacatcaagtattaatattctgcatatatccatttattgagcacctactgtgtgcccacctgtgtgctagatcctaggtgtacgatattgagtggaatcaatataatctctgagcacatggggtagccagataacaatacaataaaaattacagaatgtggcaagctcgaagagaaaaatgagtgcggtgtggtgataaagacaagcaagttctcttcttctacataattctttgaagttgaagtgatgcttatttgttacactgataataaaaatgtataaggaaaaaataacttgccctcttctggctccatgtctgctcaggaatcaatagaaacagtttggccaaccattcatacttttctttgcactcatacaaatgtatgtaaacatacagcatttttgttgtggtttttacaaaaaaaaaatggattctgtgcattgctctgtaactttgttggtttgccttgaaaagtccttagaagtgttattagtatgtgatgtttgctgctggcattttacctacccaagactcagtcagcaatagaaaactctccaaagattttatagatgaggccctgtcattatcacggtatcctctctggtctccatttaattctggccactccatcccataatttattgaacagaaaaagattctctagggtgtcttactactactactgttattattattcctgacaacctttgctctataatagcatttctgatctttttcccttgatttcctgcctacttacctatttatttattttgccttttcctttgtcaatctcatgctgtttcttgggcattgtttcatttccatatttataaatttaacattttaaaagataggtgtttctagttcatagatttgctgcaatcaccccctactaaagaacttcagggttttttgttttttttttgtctgtgctttctattttgttttctgctaccaacaatactgcaaaacaagatgggtttttatataccgctgctttcatttatgagaagtggatttccagaaatagaatttctagacaaagtatatgtttatattttatcttactacatatggccagatcaaatttcaaaaaaaacctgaagcattttgacatttaaacagatatctttggtgccagtttatcagcccagacctgatatgcaaattagtagatcgtgatgttattgccacttcagtaagaaaccatatgttaatttacctcattattctccatagggtactttttcacttcagtcctctaccagggatcctgaaagagcagagtaaatagaagaacaggtcatcccttttccacattaagtagtcgtttgttaagtgtcggctgttagctgagagcctgagagtggcggcaggtacaacccgccgaggttggacgatggcagcgggacgtccagacaggagcctgtgcaattagccaagacggttactgtgtttttggcagtcaggcagcagttaaagcaaagaagggtcttttttttccaagaaggaaaagccatttaataagtttgggtcagtttgctcataacaacactacatttgaggaccaaaaaccccaggagcttggcaagccagcagtgcttggcaagtcttcctaccagctcaccaagtctgaggccatcctgcagggatctggctctctgggctttgactgtattcatttaacagcattcctagttaacaagaaactaaaggcagaggaatccttttcccattagtccaagagtaaaatttagtggctataagcaagccaccatccaagtaactgcacgtcaaatgggggacggacagtctgtttgtattgaaggctctgcgtttagtgtacacagctgggaacttgtggcccaccaaaaatgacatttatatttaggaattgggtggtgctgtctttttggtgtatgaattaacatttgtatatgacttactagtgtgaaagtctgattttataatgtgtcagagagccatcgtttacctgtctcatgaataaataaaataaaagctaagtacgtttctataaatatttaaaaatacactgccttctcatacttttcccatttcacctatggaaaccttgccaaaatgaaatcaaatttgagcgtttcaatgtaagggaaaaccagctcatggattttaaaattaagaagtggatttttttgtttgttttgtttatgttggctttgggtttgtttttttttttctctaccaagtaaatagtttcgatgaaataaacaggtccaatcatctaatgatggattatttgaatgcagattgaaattgaattgaaaatgttgagaatgagcttgtttatgcttctcaaaaagctgcagcacctgcaactgataaaaattagtgcaaacatatcaaaagtctttgaagaaacatgtggccaatccagtgccaacttggacagaatcagaacactggctgcttagaggaaatatcccaacattcagctaatcaacaatgttaaatgaaatgaagaatgaaactttttacatgactcagtattgcttggaacaatgttaatgtcaacaaggtcagttcatggaaggagatgctagatttcttaagatttttaccccctcgtatgttttcaacagcttgcgtgtcttgattataccgaattcactcagtctttgaaataatttctcattaataatttacaaagttatgtgtttgttttcaggatccaaatttgtgaaggtagcagattcatatccagttataggaatctgttattcctttttatttgaaaaagagtaaagctttctaaacccaagctcccatacatataagcagaatcatggcttcatgcaaccagccacatgttattattttgtttgtaacaaacatctgttagaaacaagatttctaagttttgtatcgggttgaccaaataaacttatttctttagtctagggtttctcaacagtggcattattgacattttggactatatgattttttgctgtagagagctcttctgggccttgtaggatgtttagcagcagcatctttggcccactcaatgccagtaggctcctcccccaaggtgtgacagtaaaaaacatttccagatcctgtcaaatgtctcctcagaggcaaaatcacccctagctgagaattactgctagaaacagctatataaataaaacatgaatgtgttaaacaagtctccctctttcccccagagaacacttctaccacctaaagatgatgaatattaatgatcccttatgtttcccagaaagttgccatgcatatatgagtatgtacatctgttctgcacagtcatggccattcaatactacccttattttttcatttttaatgtatctgtgagattcttatcttgcagtgcatggggacttatatttaaaattaaatctttttaaacttacttagagttcattacaggatgagccgtaatttctttaaccagctttcaatatacatgcaggctctagttctttgttttccatatataagggtgtggcattgttttccaaataatgccataccattatatttttgtgttgaatattatgtgattagagctataaggtataatttagagtatgtccctacaggtggaatcacttgttcaaacgaaaactaaattaaacatatttatagacaatgctatctcaccagctgggtattacagtgttgtttccccagtttaccaaacttttatatttttacccatctgataagaaaaacagttatatccatttgtgtacatgtttaataaaaatgagatttcctgtgtttctaagccttttcttccccctgtgatcacactccatatactctttgcccatttttctagcagcttgtagggttctttctgtctgatttgtaagaactttttatatattgaagaaattgggcctttgttttcatagatattccaaatatgtgtgtactattcatttaatatcagttttctttcaactttgttaatatttgtatttatagaaattagtttcaaatttgtccctcatttctaagtttaatgtcttacaggagtcatgtttcacatagagcaaaataatggttttcatgttttcttccaatgctttcagagttttgttttttgtgcttaaatattcaaggcatctgaaattcatttgagtatatagagactgaaatactacatattcttttccaaatactatggtaatttatcatgtgataagggacatttcaaacaagtgggataaagatgacttattaaacaaatgctgttgacataattgctgatatttaggtgcaaaataataaagctgggtccgtacttggtgcctgcaaggaaccaacagaaggccactgtagctgactggaggagatgcagtgttgtcagaaagataggtgggggcctgattgtgttgggctttgtaaatccaagctaagaatttgatcttttttgaatagagtgtctttttcatgttcatttggcatgtttctcttatatgtagcatatattttggattttatttttttatccatctgaacttttatcgtatgttgggctttgtaaatccaagctaagaaactgatcttctttgaatagtgtctttttcatgttcatttgacatgtttatcttatatgtagcatatattttggattttatctttttacccacctgagcttttattttttattattaatataagacacgtgtttaatattacttctgtcatcacattttatgttacttttcagcttttgatgtttccttggtttctatcttttactaaaattcctatcacactttatttccctaaggacttgtaaacatcttttactctcttttggtattgtgtactgctagagagaagtaggaagacttcttgatttttttctctttgttactttttctgtctgaatatactgaagaattgatcctataaaatcttaaaactcattaatttctatagcaggacatgtgtgggtattgatctttctgtgtctgttgcttgttttgtttcctaggatgaaggatcccctctctactggctgattagggtatttcagaaaattttcttctgttatatctttgaacatttttttaacttctattttcctctttttttaaaatacatctttttgggaattttttgcttatctttaaagtcttctgacctttgctgagaattgtgttctcaagctttactacctatctctacgtgtggtttcagcagtgtcagttcttttttttgaggcagagtcttgctctgtcacccaggctggggtgcagtggtgcaatcttggctctatgaaacctccacctcccaggttcaagtgattctcctgcctcagccttttgaggagctgggattacaggtgtgcaccaccacgcctggctaatgtttgtatttttagtagacatgggttttcaccatgttggaccaggctggtctcaaactcctgaccttaggtgatccaccctccttggcctcccaaagtgctgggattacagacatgagtcactgaaccctgctagcagtgtcaattctggctttcatttctctttagggtagcttcagtttgtaacaatgacctcttcctatttgtctctttctttgctatattagacatcttattgtaactttcgttgcaaagaaaattcactttttcattagctctcttagtctcaccaagaatgtttgagattttcttcggccgtgtggcttgttctcctggaaagattatttcatgtgcgtttgtcatatcctcttatttttttctataatatttttggaagatgtctaggggaaaggggattccaagttgtcttggagcacttcctgctctggtctcctatcactttgcaatcataagcacctcccttgctgttgtttctttcccttaggagaggaggcctgtatgccctagaggaaatttctgtgtgttataggtttctcttggatgattctgcattttttttcttttcagttcaccttgaaacttacttgatcagtgtctgccaagttgattgtcatttatattttctatactgccctgctgtcttccctgattgattcctgaaaaaaaggagggaaaaagcatattgcccttcagctttaatttgcctgctgtgttgaatccatccaggattcaacctctgcctctgcttgccctgacctctatattttatctattttatcctctaaattagagttggtttggctatttcttgcgttgtttcacctatttctttgaaaactttttttacttggtttaatctgtagattcggtctgctgtgggcattctctcttgatttggtctaatctgatcatatttgtttgcatctattgtatatcatttgtagttttaattaaagctactcatagtttcattgtgtatgtgtttgcctttttttttttttttttttttttttttgagacagggtctcactccatagcccaggttggagtgcaatggcatggtcagagctcactgctgctgcccaccttttaggctcaaggaatcctcctgccttagcctcccgagtagctgggactacagaggtgtgcatcaccacacccagctaactttttattttttgtagagatggggtctcactatgttgcccaggctggtcatgaactcctgggctcaagcagttctctccccctggcctcccaaagtgctgggattacaggcataagtcactatgcccaggctcttttctatttttatttgttttttctatttttagttgataacaagacaacatgttaactggattttgcaataaaataaaatacccactagatatcttttggtcaattgtttgaataggagaactcagaattatggcacagtcttgggaaaattaacttaaaacccttgaaacagtttactaatgtgtttgaatctgatgtggatccaggctctcattgcactaaaagtgtggttgaagtattgactgccaagacctccagtggtagggagagagtggggttgaaattgtggttttagggatggctattatttgaataaatgttgtaggaattttccaagcacagaacacagcatgaatctctggttcttagttcttcaccaatatttcttcaccgagaatagccagacctcttggaagggtagttgaaattgagtgactaggagagagagcatcagatcctacaaagaatggtgatgacagaggatggagggaattggggtgatggtcaaagggtacaaagtctcggacaggaggaataagttgtttggggttttttgagatccattgtgcagtgtggtgaatataattaatagtgcattgtacatttcaaagttgctaagagtaaatttcaaatattctcacaccctcaaaataagtatttgaggtgatagatatgttagttagaatgacttaattattctacactgaacttggaaactttaatatcactttgtaccccataaatacatacagttataaagggtcaatttacaataaaataaaaagttttaaaggaaaaagaaattaagagtgaatagaagtgtggaaggatttttgaaagtcagcaagtttatcttggatttaggagggagccctagtagttttttgaacagggtaatgacaaggtgaaagctgtatttaaggaaaacttcatctagcacttgatttggcatttaatttgatctcacggggacttggtgagtacctgtttgtaccaagtatcatactggatacagtagtgcacagagcagcatggggaagaattcctgcttcaagaaacgcagtctggtggagtcaagaaactgattttgaaaaatctgcctcagtaaaatttcagtaccagagttgacctcaactctggttgtcatggtgtctgttctatgttgccagttaggttctaccacagcagcggtctctgtctgtgatgatgtgacacagataacgttgattctatgatttgtatgggacactctaaagtctgccctcaatcagactctcatatctcatataaatgtagctgaatattcagcagcaactttttgaattccatattttcatgtttgcttccttctaagtcaggtttctgtcctcccggtggctcggccctcttctaccccagtcctgctgcctccgtgtattcagattacatctggatgatcacatctcatataaatgtagctgaatattcagcagcaactttttgaattccatattttcatgtttgcttccttctaagtcaggtttctgtcctcccggtggctcggccctcttctaccccagtcctgctgcctccgtgtattcagattacatctggatgatctttccttttctgacagtgttttttgttttttttgtttgtttgtttgttttggtttttattttcttgagatgaaatcttgctcttgtcgcccaggctggagtgcagtggcactatcttggctcactgcaacctccacctcccaggttcaagcgattctcctgcctcagacccccccgagtagctgggattacaggtgcgtgccaccacaccccgctaatttttgtattttcagtagagatggggtttcaccacgttggccaggctggtctcaaactcctgtcctcaggtgatccgccaacctcggcttcccagagtgctgggattacaggcatgagccaccacgcccggtctctgacagtgttttatcccttgtcatgtacactaattatatcctggcacttggctctgtagttgtttttatatcagtcttgcctaatcggttagaatcatagactacttgaaggcatgaataacagcccacattttatctatttatttatacatctctcattacttcaaaaaatgatttgaacatgtttcttttatatgattgtgttttgaccttggtcaaggtggtagacatctgattaaggagggtcaataatttatgaactcagaacacacagaacagaggactttttgttgttgtttttaatttatgatttatatctctttgaaagtccggcaaagacacatcgtatttctcaaatcaactttagagaaaaacaagaatgtgaagctgagactcctccagtcaatgagaaagttttgataccaaacctattaaatgcaaattaaatctatttttctatgaacatgtgcatattatctctgaaagtagatgtatgccttaaatataaattttccttacaatatggatttctgtgatatcgggaatctatgttttataaaggaacaactgctgcagtccctgtggctcatgattccttagcagctgtgtccagctggtggtccacattcccgctacttcttcagtgaatggaaacatttaggtcaatattgatataaaacttcatgagctttcttctctttcagctttggttcgcctttgttaatggattttctgggcagattttatttgaacgttggtgcatcggcctgtacaatgtggtaagcattcttcatctctatctgatagcatgcagaacttagaacttcagtgacattccttcactgtttatgtctgggaagtgtatctgagtcaatcatctgtatacttagcaggcagcacaaatacatctttgggccctttgttgctgtgaaacatcctgcagaagcccaaactctccacacatggtttcaatcatagcagatcattcctgaataaccccttgaaattattaacccatatatcttgataatagacccttgttacccccttactacatgcctgtgcaacactttcgtgtttttagctcaagtacaaatttctgaactacacctaaactcattccgcttcattatttttgttctgaattcttaaacatagatacaaatatacagtgtgtgatctggtgtccgttctgtccttcctgaaagggtatctgtccttgtggaagaacattttcttctgcagttagagctaaaataatgaattctgacttccagctactgtggaggatggtaatcagctcatctggtattttttatgattttcaagttccttttttattactttttataactatgatgaattcagaagctagaaataaatataaactgtagctaaaatggctcagtagctgcttagctttcttgctttttgtttcactggcaggaagaactaaggggcatgtagagcactctagagaccctagaatggcccattttttgagttgttctctcacttgccttcaatcctaactctgctccgtgggaatttacattctgaagcagccatcataaataaatgtagatggaagttaccagacatacaataataaaacctatggtgctataaatccactggtggctagatatttaagtcttccatgctttcacccccctttattgaataacctcagtgctgggtgctgatgtaaaatgctgaatgcagtagtttgccctggccctgtgtagcttgcaggttaagagggtcaaatgtgtggattcagacacctccaaggaggactgggtccagatcttgagttgaaattgtgttggtgagtcagtaactgtgttaacttgctgcaaagtcactagcacatttcctcctgatactgatgccctaaaagacaaagattaggagtggtaagaacaggacagaattgatgtccattccctcctgtgctaaaaaagctactctgactacctacccatggatgggggctccagggcctcccctttgtgtactaaggggagatcacagattgctaactctgtacctcctgaaactattttaagtaggttaaagctatgcaaccatttcggggaaatatgcagaatgctccacgattattcagtgcttgaaagggtcaggtatcaatggagctgacacttcacacaaacacatgccacatccctattttagaaacaaaatgctgagacctaggagagattttgttgtagagccaaggacaggtgtggtatatatatatatatatatatatatatatatatatatatatatatatatatatcacctgcttatagtatgagtggattttagcttgatttctatgctcagggcatgagggctggattcttttcttagctccatgcagtcttggccaattcaaattaatccaacagattttattgagtgcctactacagataagatgctgacaggctagagggcagtgttggtcaaaataaggcccacagaccatttgcaggagaataactagggtttatttgaaaaatgcagattcctgagccccaccccagtattaacaaagagtatctcagacatattgcagtttttgcaattttttttttttttttgagactgggtcttgttctgtcacccaggctggagtgcagtggtgccatcactactcactgtatccttgacctccctggctcaagcaatcctcccacctcagcctccttagtagctgggaccatgggcaaatgccaccacagccagctaattaaaaaacattttttttgtggaaatggggtctcgccatgttgcccagattggtctcaaactcctgggctcaagcagtcctccctcctaggcctcccaaagtggtaggattatagtcatgagccgcaaacttttctagttattgttatgcatgaccctagggttgagattatattttatgcagtttttctgtcccctaaactatacagagagtacactgtgatagaaaagtgtatttcaaggtgaaagggtctaggttaccactgagtccacagtgcaggcattgaagtgggctgccagtgagtgctggcagttgggatggaatggtcaaggatctgccaggtgaactccaatgtgccactgggctctggacttgctcatactggaggggccaaaccttctgggaacatggagatttgcccccatgaaaattgttttggtgacatttgtataaaataaatagaaatatagagaaaagttacaaaaaaggtacaaagaactactatttacccttcacccagattgaacagtaattagcatttccaccaattgcattctctttctccatacttgtacgcatgcacacatgcctacactcatgcacacactagtgaatgcatttatttctgacccagtggggtattacaaacatcatgtcgctttcctgcttaacactttagtcaatagtagcaagagcttcctcttatacaaccgaagtataatgatcaaatctgaaacatttaacatggatttaatactattatctaattcatcttaatccatattccagttttgctattcttgctccaataatgccctatttagcaacttttccagtccaggatcattctagagactgcctgcaagagaacatttgtgatgtggaaggcatttgctagtgatcctcctcttctgggctgggttctccgctgtcattttcttcatgcagtatttctctcctgctttttcttctaaatgtactctttgtttgattccgcaagtcagctaaagtagcaagtcgttgttcctcaaactaattttcttttttttttttttttgagatggagtctagctctgttgcccgggctggagtgcagtggtgcaatctcagctcactgcaagttccacctcccgggttcacgccattctcctgcctcagcctcccaagtagctgggattacagtcgcccgccaccgcgcccggctaatttttgtatttttagtagagatgaggtttcactgtgttagccaggatggtctcaatctcctgaactcgtgttccacccgccttggcctcccaaagttctgggattacaggcatgagccaccacactcagcctctcaaactaattttcataacaagttaatagcattaaaacagacttgaggccgggcgtgttggctcacacctataatcccggcactttgggaggctgaagcaggtggatcaccctggaggtcaagagttcgagaccagcctggccaacatggtgaaacctcatccctactaaaagtacaaacattagctgggcgtgcccgtgtgcacctgtaatcccagctacttgggaggctgagacaggagaattgcttgaacccgggaggcggaggttgcagtaagctgagatcacaccactgcactctagcctgggcaacagagcaagactctgtctcaaaaacaacaataacaacaagaaacaggcttcttcctaagtaatgaatgaatgctgtcccagaagattttcattatatccatagtcaaatttctttatttttttttattttttttgagacggagtttcactcctgttgcccaggctggagtgcaatggcgcaatcttggctcactgcaacctctgcctcccgggttcaagcgattctcctgcctcagcctcccgagtagccaggattacaggtgcgcaccaccacgcctggcaaattttctgtatttttaatagagacggggtttcaccatggccaggctggtcttgaaactccttgactcagggtgatctgcctgcctcggccccccagagtgctggaattacaggcgtgagccactgtgcctggctcattttgttttgtgggtagaatgagactaaaaataccacgaaggaccaatgctgctaggatcaaatggatttcagctaaattttatgtcttttataatgcagagaacactctagtattatttgaccacttgcagaaaatgaatcctgttgtcaagccagcatcgtttgaggaagaaaactgtaggccagtctcacttataaacataaatacaaaaattctacgtaaaatattggcaaatggagtccaataatatattaaaagaaaaagtatgtgacaaagtaagatttattttggggatacaggagtcttgaaattaaatatctttctaaatatcactatatcaagaaaataagaaaaacatgatcccatcagcagatgctacaaaaacgtttgaagcaattcagctgccattcccaaaataagaactctaaataaaatagaaacagaaaaaagccatttaaccagaattcagaccatttacaaaaaccagtagcatgctgcccaaaatggtaaaattctgaaacggtttcatttaaaataagaaattaatcaagatgcctgccatcactatataattcattgttttcatgttttcggcaactgcaaagaagattacaaatattgggaaaacagtgaacaatttctgtacgtatacacatatgctcacagaaatatggtaatgtaaatatgttcatatatgattgtgtatctagaaaacaaaagaaaaaacagtagataaatactcgaattataagagaatttgataaagtgtccagataaatgataaatatatttttaaaatcaatagcctttttctagcctagcaataaacagcttttttttttctctagcagtggacacctagaaatgcaaaggaagtacgaattctttcaaaaaagcaattaaaattatacattgcataggaaaaatgtttacagtacctacatttttaaaagtcttattgaacaaatggaaaagcatactattttcttgtatgggaagacttagtatcataaaagattcaactcttctaaaattaatataaatatatatgattccacatagactcaatcccaacaggtgaatgttttgggaggaaagggggaagttgcataaagttatattaaaatataaatggaatttacacatatctgagaataaatatgtaaagcatgctcaaaaaaagaacataaaagtagacttatttttactaaatatcagactatactatgaagccaccataaccaaatcactgttattgacaaataagttggagattctagaactacattcccattctagagtcagatgtgtaatacatgaaaatttgattagccttaaaggtgatctttcaatgtagtggggaaagtttggcctcattaattatgttatcacaattggctctttatctggaataaaatggactcctatatagaaaaattaattccagatatattaaagacttaaatgtggaaaataaaatagtaaaatcctacaagacactcctggaaacatgtacttttcatggaagagtaacttctgtagccgcaattggacatgcagaagcatttcttggccatttaaatattaaaagcttttatatggcaaaagaacccatttaaaaaaccaatagacaaagagtgcatttgcatgaaatttcataatataaagacagggttgatatctgttctactcaaagaactctttaaaaagaggataagccatggatagaaagtagacaaaagacatgagtagacatttcacagaactgcaaatgcagatagccagcaaatgtatgaaaacctgctcaaactcactgatagttggggaattgcagctttttaaagtaagaagtagacaaaagacatgagtagacatttcacagaactgcaaatccagataaccaacaattgtatgaaaacatgctcaaactcactggtagttggggaaatgcagctttttaaagtaagaagtaacatctttaatttttaagactggagaacattaaaagaccaatgtaacaaccattgctgatagggaaatagcgaaaaatctatgattttcttttgcaatgggagaggaaaatgctttcaaaatcctttgaaaggcagaatctagtaaaattaaaaatgcatgtatccttttaactctcctgctgggccttcttcccatagagataaaagaaaaagtctgtatgttataatatagtatagatatgtattacataatgtttgtggtaacaaagaactggaaagaaaatgaatgtctgtcagtgggtgaatggctaaaaaaaatggcacatccatactatgaattattatgtgaccattaaaagactgcattaccatcaaacccaagggctttggggggctttctgtaatgtattgtttagcaagaaaagcatgatgaagaaaaatgtgtgtaaagtataatgtctacctttttggttggcaggagacagggtctcactctgtggcccaggctggaatgcagtggtgcaatcatagctcactgcagcctcaacctcctgggctggagcagccctttcacctcagcttcccaagtagctgggactacaggcacacactctcttggtgtgttctgtgaaattgagacagggtcttggtgtgttgcacaagctggtctcgaactcctgtcttggcctcccaaagtgctaggattgcaggcaggagctacatgactggccagtgtcaacgttttatgaaacaaattatgatccctaacgtgtgtgtgtgtgtgtgtgtgtagtatggtataggcagagtggaaaatatgtaggcatgctgggcttcattatagcatggtgatgaagggcaggggagaatctgaagatgggtagaaggagaagctcaagtttaaaaaaagaaaaagactgccacgtaaacagcaggcatgacatcacatgtacacatggatgcagagcaatggaggtgagagtatgtactaagaaagtgtgcatggctcctggcttctggtagaagctctgtccagctataaagcaaaaaatttttgttgttgtgaggaaagtgagtgcaacaagtcccctgtggatttctccttgaagtctttgtagcacattgaaatcccagggctgctttccattctgctgtggactgaaggaagagtgtgagagttttactgactctactcaccacacatctgattgcctgctcccaatagacttgggaacagcttcctctggccatatactccatctccaaatagctagtgtgagttcagaattctcgtacagacacacgtccaattcccacaggcctgagagcttgctgggtttgtgggtggggatttgagggacgctcagcagcaagtgacccaggctgtgtgaaccattcccagaaccaagcaggagaaggaccctcagggccaacatgtcctgagttaaaatgacatgtttcttccaagcaccttcttcagctcctgcttgatttttctaatatacaaatgtgagtacaggtgaaagtcacaagtcttgcaaggcaccatctgcccaagaactcattgtcactggagattgtttggtctggtctccttcctatccttgccttacaccgcaccctcagccagccaccatcctgtgtatcttagaaagttcctcgtcctttaaatgacaacaatttaaagatcgaattggcttttattagccattctggaattgggtaacatctcatttcatgaaacagaatgagtgctccgatgagctgagcagaggaggccagctttataggcagaaagggactaaggaaacagaagtagaacaaaaagtgattggttgtttcaaagtggctttctttacagagttcaaacaggggactctgtatcatgctgcccaggtaaactgggccctttctggtgcctaggtaaactggttgctgtgaatctcctgttttttgtttgtttgtttgtttgtttgtttgtttttggaaaactggcctgtttcaaagtttagtttgatgacacagctcttagcacaagtaactccattttggtttggtcaggtctgctggggccgagtgcaggagctcagtccaaacagtggcctcctataaacgttgttcaacacctccaaacaggcatgctgatgtctcagagctttgtaaggggtgcatctctcatgggactccttcctcgcccacatccctgtcatcttgccaaatcatgttggtctaataccttgcaggtcagatactctttggtgcaagaatcctttggtgactctcccttctccttctgcgtcctcccctaacaggtattaatagttttgcagagctccgcgttttgtatatttacctctatgcctgttgccccactgccctcccccacttctgcagtagatggcgttcctggaggtcctaattcctttccttctttcttctgtttgtaaatctctccattcctggtgcttatcacagtatctagcccataatttgtttattgtaaatgtctgttgaatgaataaatggatgaagtacattatgcttcctgaaatttgagtataacgtcagggtggaaagttgtaaattttacgtcagctagcgtgagcagaaaacaaagcaacacttcagacagctaactgtggcatgattccacatcagtcttcgttttacaaaggaaggtagttgctaatttaacaagaaatcttggctaatcagataatgtacgatgtttttagtgttcagtgtattcatttgatagtgattaacgtaaaaatggtctttcatttatttcctttgtttggagggtgtctggggatctgtgaatcatggagtctcaggtttggacttgactggaagtgaagtcatcatttggtagaagggaacaatgaagccgtgtggatccgaagggctgcttttaatggctcattgttctccctgcagattttcaccgctttgccgcccttcactctgggaatctttgagaggtcttgcactcaggagagcatgctcaggtttccccagctctacaaaatcacccagaatggcgaaggcttcaacacaaaggtaaacagagtgtgatctcagaactgtcacctcagaaaggcgtggctgtttgattctagtcatctgcctaggagatagttgaagcttgagaaagaacatttgagaagtgctgaaaacatgatccactcaccccaccaccacacacacacacacacacacacacacacacacacacacacacacacgccacaaacccagtgaattcaagacgccttctcaggtgacgggtccatgctgtgtgggctgcaacctccagtcccagcatgctgactccttcccgcttctccccgtcagcccctgacatcagtgtgggcagcagttcccacagcccaggttcaggatccgctgtcagagatcccccttgcgtggtcctgcagccccatgtggaggcctgttggcagcttacctagctgttgctgggtttgtcatttgaaataaaatgtgtctttagctagtgcgtaaaattgactagatatgaactcagggatcacatgagttgcaggggatttggttttgtttttctggaccagagaatcagaaaggaaccaaaaaaaaataaaaaaaagaaagatataggtgatcctgacaaacccgcgccaaagctgggtggggtgttaaaggggtcgtgcagtctcagacagcagaggggtctgccacacagatgtcatttgcggctgaatgtggcagagtgcttgggtgaccccatccaaagaaaagggagatgtgtgcctgggcacagaggggcgagatgtgagcatggctgcacggccttgtttctgcctctggtctttgcgcaggggggattcagaagtttagacagaggtctgttgcacagttcacctcctgtgctgtgtgctggtggcggtcatgatttgcgtgcatggttcctgggccgtcagtgagaaggacacagggagtcacctctccaggcctcaaggagagaacagtctcccagggcctttcttctgagccagatgttcctgacgtcccttacagctgcttttttctggggaggctcactagttacatccgaggcagggaagaaacagaagggctccttattggttctaccgtctcccacatccaaagagacccgagggactcattttaccaatccttgttgactgtgattccgttaatgggaaaatatgacccattttcactgcattatttacataaatccattttctacagaatttgaattcaaaggccatttgaggtgggaagtaagtaagagctgagaatgcacggaaacttatctgcaggcactttgaagaattttttttttttttttaagtagagaggtcagagatggtgcaaaatgaacatttaaagcaggggaaaattccattgtcttataacatttttcactattttctgttgtcttaccactacttaggctcaaactatatgataatttccagggacaacttgtagaggtttaaataaatttaatctggctttaatagttaataactcgaggggggcagccaagatggccgaataggaatagctctggtctacagctcccagcgtgagcaacgcagaagacaggtgatttctaatagttaataactctgtcatcacggtggttaaaacaatgattgcgatgtattagtgaaactaaagtttagaataaactaaaccttgtgttcttttttctgacctttaaacattaaaataaagagaattttcaaatatgcatgttatctaaaatcccaaaaataaaagaagaagttgagtgagagggatttgaagtagtaaaacaaaagagtgagaatgccatgtaaaaagttacaagtggaatgttttcagtgcttttaagacatcccatctgccccgacacagtttaattgttaagaagagacacagttttagtctcttcttaacaattttgacctagtaccctttttctggatgtttgtaaaatggtgttgtctctcttacaatgctaaagaaaactgatcagagtgaatttttcacatgtggatagattgtgttggtctgcatacatgtgagtagatatttaggtctttgtaactaaagtaatatgatctggagataatccagtcatttgtatgtaaaaattaaataatcgatttgggtgggttttttttttttcaaattcaagaataatatgctactcctggaaccgtgcagcgcacggccaggatccttcacaatgtggcgtttgttgagagtttcacagaggtcaagcgttttgggcagctcctgactcccttggtttgtttttccttaggttttctggggtcactgcatcaacgccttggtccactccctcatcctcttctggtttcccatgaaagctctggagcatggtaagggctgtgtgatttcacctgtcagcaaggagctttgcagccgctctgctgcctgtgtgttcacaatttttttttccagttctgcagaacaagagatcacaggaacacattttagaggaaaaacatacctaaagcataatgagagctagtcccaggtttatagctgttaggtttcatcagttctggccttgagaacccattttctttccagttgactggatagtttgagtactaggaatactcaactcagttttaaaaactatttgagtcagagatcttcaaggaaagccctgtactgtaatgaaatgttgatgctttttgtccgtggtttgaaattctcttttaattactttgacttttatttctgagcctcccctacccatatgcagaataactcaaatcttataagatttgaatcttattcctagctttctgaaagagtgtcctgtccttgatgtacgccttttgaaattagagtttgagaactaattctccagattggtgtttgtctttacagctagaagaggatgtctgagaactgtggcagactcggcgttttttcacacttcttaacacatccagaacgtggcctcctaaagagacatatttttattctcagaaaatacaaatgtatcatgagaatgctactctttcatccctctcaaatagtaataatccccctgggaaaaattactccaaatgttgactagacaaggccctttattgttcaaagaaccaaagaatataaagtttccaagcgtctttgtttctgtgtcagtgagttttatgcttcaaacagaaatgattcatcctcactgatattctttaacctattaaatactgacagagaaaatgcatgcactgccattttcttatgccacgtgatatagtctttcaatttcatcagaactccttttccttcgagggttcataagtctttaaatcagagaatacaattttatgctttctagccccaccccaaaaaagagcattccagtgaaatcattttcttttaacttgaaacccttcttgtgattcatctttactcagtggatttaatttattttaaaatggttttataaataagagtgtatacgtataagagtttgggatgtgattttgtttcagaggctgtgatattttggtgacagactcagccatcattgtagcaggaaggattagtgatgggaaatggtatgtctgatgagcataagagaaatttgagcaattatcctccatacctgagcccaggctttggtacttaagaagagtctgcaaatagcatgaactagccacaagtactctctgaagaccccttaccacttcttatctagacatcctactgtgttcctaactcagaattgcttgccttttgactctcagaagctttacaagatggtcatttacttacctgcttcaaaaggaactagtgtggctgttctgcagtggagacgatggttttctaatcctggaattatgatcatatacgttcagttggtgccttgtggtttgtggtgaaattgctatagtttaaccagattccattatgtaagtccattcattcacctaccatggtcagtatttaaaaggatgtagactcccagcagttgctaacttacctaagagacagcaccaaatgaattttaaattagtgctatccttatctaattcctccaaatttggcaaattacctggcaggcagccaataggatgcttttttcctctttttattatcaccatcatcatcaatgtcattatttcattgtatttattgagccttcagcataggggttttctttgagttgtgttgcaaacaataatctattgagtgaaactgtgtaaagtgaagtaaattgcaaatattaagtgtatcagaacaacagagggacattggtgttcttggtcattagttgacttcccctaacaaattgaatattttataattaatttctaaattctcactgttagtacagagaaaaaaatcattatattattgttcattaaccttattcctgttatgttcaagacactgtggtagattctaagggtgacagtagatatatcaatgtcggtctcaccttcaaagagtttgtagtatggaaagggagattagattttgtcttagtccattttgtgctgctataagagcaccatagactgggtaatttatagtgaacagaaatgtatttggctcatgattctggaggctgggaagtcccaggtcagggagctggcttcttgttaggacctacttgatgtgtcatcccatggtggaaggatatggggtagagagagaaggaaggaacccatgccagtgacaacagcattaatttattcatgagggtggcgcccccatgacccaaacacctcctatcaggccacagctcccagcaccactgcattggagatcaaactttcaacacatgagctttgcgggctgcattcaaaccagagcagatttgcaaatgaataactccagtacaaggtaaaaaatagctgtttcaagtaaaccatagataaaatgctattagatatcagaggactgagagatgcctttcatttggagttattaatagcttcctaggggaggtaatatttaagtttagccatgaaatccagcagaaggaagaatcaagcaaagtggggaaatcaggacaggtgtggaaaactgagcagctgaaaggtgaaagatggggaaatttaggaaggcagataaaagctgaattacagagggctttgagtatgaggttaagaaactgggatgtggctgggcgtggtgtctcacgcctataatcccaaaactttgggaggcagaggtgggtggatcacctgacatcagttcgagaccagcctggccaacatggtaaaaccccgtctctactaaaaatactaaaattagctgggtgtggtggcaggcacctataatcccagctacatgggaggctgaggcagcagaatcgcttgaacccgggaggtggaggttgcagtgagccaagatcgtgccactgcactccagcctgggccaaaaagcaaaactctgtcaaaaaaaaaaagaaagaaagaaaaagaaaagaaaaggaaagaaggaaggaaggaagggagggaaaggaagaaggaaggaaggaaggaaggttggaaggaaagaaggagggaaagagaagaaagaaggaaagaaactgggacttaactgtttaggcattgaagggtcagtgtagaatttagatctagaattttatgatcagggcaatttgggaaaataaacctgtcatgtcttgtaaggtgagcggtagaaagaaaactactggcagagattccaggggacaacttagggagggttaaacccaggaatgggatagtgtttggagagggtgttttgaaaggagcttctttgtttgctgagattgtggtgtatctacaaggtaaagaggctctctgagggcacagtgaatatagatatcagcaagccaggcactgcctctcctgccctctggaggcttccctcttgaaagaggagtagggggtggtcacatgggacaagggagatgtggggcatggttgggagaaggaacattcctggccaggaccttgcaggtgcacaggacctgagctgctgaggccataggaagtgttttagtgggactgggggtgcctggactctgaactctgtcagcctctggtgagaggctcgggacactgggcattcctgccccagactggaaaaaacagtaacctcctactgtaatctgactgctcatgccccccccgcccaattcatatgtcaaaacctcaaactgtaaggtgatggtatacaacatagggcctctgggaggtgattaggtcgtgagggcggatctctcaggaatgggattagtgtacctataaaaaggaccctagagagctcatttgccccttccactatgtgggaatatagctagaagacatcacctatgaggaatgggccctcacctgacaccacaactgccacttccttgatcttggacttcgcaggctccagaactataagaaatgaatttccaggggttataatccatgcagtttatagtattttgttatagtcagccgaaagaactaagacactccctctcctcctttccctatccttctggaagtatcaatcaaaacacatctctacatatttctagcatcccccttgtagtggacaaccacccctagtcaagacgactacagcatagagaggaggtaggggctggaaaagggaacaaatacttgagagaggatctgatcactaacacctggcggagggggggactttttctcagggcagggttggaggtaggagagttttgtgatgagatttgcctgtaaagaagattaagactgctctgtagagaaacacataggatctggcaagagtatgccaggaccatgcggttgcacaggacctgagccactgaggccatgggaattattttagtgggactgggggtggcagggatttttttggtagggatgggagtggcagggataaagactgtaagcaccagaggaccaggatatgtcagctgactggaggacttgtttatgtgtgctgatttgctgtcctgagtacaagtgaattcttattacactttttttttttgagacagagtcccattctgtctcccaggctggagtgcaggagcacgatctcggctcactgaaatctccacctcccatgttcaagtgattctcctgcctcagcctcctgagtagctggaattacaggctcatgccaccatgcccggctaatttttgtatttttagtagagatggggtttcaccctgttggccaggctggtctcgaactcctgacctcgtgatctgcccacctcggcttcccaaagggctgggattacaggtgtgagccaatgcacctggccttattacactcttaattgtcatttaggagaatgtatatcctccccacccccaaagaggcataggaacatggcaccaatttgagacaaactagggcactgtcaaagctgggggcccttggtctaacagaggggtgccttcaggactctcccctcctgcaagagctgcctgaagccatccctcagatggccacccacacccagagccccagaggagttttgtttgaccgggggctgaagtccctagagtagtttcatttcccacttgataccttatggatgatgtcacaaagacaggaggttttactagaaaattctgcctccaccatctatggagagaacctcaggtatatatcaacagtgttcactttgggcaaggcaacagaagcacacttcttcttgggaagaaatattttgagaaggtatatcgttcattccctagaatgcttccaagaattttgctttgcttattttcatgtggttttggagagacttttcaaagcactcctttgctgatggagtttgtgatgattcatttcaaatttcaaaataaatttttccactcaagcaattcagtaaatcagatttcttccaaccatcacagccatacacttactgccatggtctgcctgcagctcctcgcctttgatctggaaagcgatgctaggttagacctaggatgtcaccttcacagggacccaagtccatcaggagccctggtgtcagcccacacccgggtttcctgttggcatgtccagtcggcagagttgagcaaccctccttgaagtgtaatgtggttattggcaaaataatacaaaatcggtcttgattttaaaaaaggaagtattcagatttttcttgatgaaatttaagagggaggtgatgggaaagagactatgcttaacaaaagaaaagagctcctaaaaacatttgttcttgattccccagagtccacaccgtagaaactgctccctcaccgtttaaggagaataccatacggattcttatgtatgggtactaattacgcaactgggcctttcgacatttttggagaagtctattttataatttttaataaatttgctcctgtaagatcagccatgttttgtatactgaaatagtagtgcacgtgtataaaataaaactcagtgtgactctcttttcccctggcattcttgggtcatattagtttaaactatttctgacccttactttattactgaaaacttgagtgtttcataccatataaatcctgagacttgcgttgtttcacattaagctaaatttgggcaagattgccagtgttctctgagactgcaacttcttaaactcaattattcactcatttttgtaaaaagataaaagagtggctgggcacggtggctcatgcctgtaatcccagcactttgggaggccgaggcaggcagatcacctgaggtcaggagttcaagaccagcctgaccaacatggtgaaaccccatctctactaaaaatacaaaaattggctgggcttggtggcgcatgcctgtaaccccagctacttgggaggctgaggcaggagaattgcttgaactgggaggcagaggttgcagtgagccgagatcgtgccattgcactccagcctgggtgacaagagcgaaactcagtcccaaaacaaaacaaaaaaaaagattaaagaatatgttctctatgccaggctcctcctgtgttctggggacacagtagtgcgttaatagaggagttcccaccctcatggaactgacacctagagaaggcaggatttgaacaggaaatgttagcaaagtagaaggtcaagttcagatgggatgtcttccagggaaaactaacctgggctgagctttaaggactgcttcctggaggatgtggcagcagagttgaaggatgagtcggaatgaggtaggagaagaggagagagaggaaagagtttcaggttgcaggaatagaatagttccaagagaaagatgacatgaagcagttggggggagatattgcggggcagattgtgagacacagattgccttgggatggtgagagtggagatagagaagtcagacctttccaggccttttggaataaatgagccttttggaggataagtgtaataaggccattggcaggttttaagcagggagctgtgcagtctgatttattgtaatataaccacacaggccaggataatgattggagtcctgttcctgggctgttgctgatctaatgtagcaatcatggcacttgagaaaagtggatgggttggaggcaaagctagaaggactcagtattgcattaattaataatccccttctccacctggttgcacaatgtcctaaacccgccaggagaatgtgctaatgcagtcataaagagcaacaaaataccatattttacagtaaggtatgtgaaacaatacactgacattttgttcccccataaaagtcaccaacagtgctatgtgcagcatggaaaagatctaaaataaatttaaaagattcagagacaagcattaaatgctaaatgggagaggaaaagagggtagtaactccatgtggcctctgccatctgggaagacctgcagggaggacagagtgtggtggaagttcataaaatcctgaagttagtggaacttgctccctaagacctagaaacacagaacattctgggagtctttcagatttgtacaaatgaaactaaaactcataaatctgcataactggttactaacccgatcatagtacattgaaaatataaacaggtttccaaattcaaatgcaagatttttgtttctgttttgttttaaaccgcagttatgaactgcggtaaagctctgactttagctgttttcctgtattgtgacagtgcacctcacacatcctgaaacccagaattgggctggaagggccattgttttcattcagttaaatatttcttatgtttcaatgtctcttttaataaactctgtgttgcgcgtattttagacagttgggtttggtgtaatgttgtaagaagtgtgagccagagttcctagatttcacccttagcaggaagttgaatcaagatggattagccagggaatctcaggggcttaacccagtaaagagttatttctcacccatgtccctatccagtggagaagtgcattgttcgcgggtgtgttgagtatgtttttcttattttccatattcctgatgcactggcattaggggccttgattccggagacactgtcctcccagggctagctaattcctgaagttagcaaatgcctcccctgcctgcatgcctttgacatacaaatcaaccaagcccgagcccacacccccagccacctcctttatcaaactctcacccactgagcaggtgttccctttgcccaacagcaccccagggccaggtacccaacaactagggaccatccttacagccctgagcctgccagaattactcccattatacaatcctaagtgtcctcagtcagcatacctaccctgcctcacctgttcctccctgtaagaaccccagtagaggcctgggccatgctcagcgtctctccaacctcctgagctccgtggcgctacctggcatggccttgccaggcatgctgtgcctcctgcttctagcatctgtgagtacgaacttctgcctccatgacaatcattccatgtctgcctgtcttaccatatctgttaaaactatgcctgcttcatttcaacacagtgaggctccatggagtacaccctcagcctcaacactgggaggggagaggcaagatggtttgcagggcaaggatcatttgctcttacccacatctggcaggaagagatccatcagttctgcccatatctgattggcaagaactagtcacagggcctagcacggcatggggtgctgggggatatcacttagttgtgtacccaggagtaagaaacacgtgtggcctcactgggtgactgcctgggcattggcaatcaagtttactttgcgtcatttttacttcctttttcagatttatttttagtaaacaaaagtgaaaaaagagaaagattgaaatttgagtttcatgtccttaactttatccagcagaaatggcaatagaggagaaaatccagcaataggcttatataaccaggagcttcacccggcagcgctggttgtgaatgtaattgtaatcactaacacttgtataaaccctgctttttataaagcaacctccgatactttatactactttttacggggaggaaaaaaataaattttctcttcatgaattcatagtgtcggaggcagaaagcataattttaattctagttcaggcactataggcatagcaggttaacttctgaaagtttgtaatttagcgtcctggaagttggaatatatcttcactcttgatgtaaatctagaagttgctagttgggatggggtgcgcttcctctgagccactggagtcttgagaggcccagagagtaaggtgggggcgggggctggctcagttaatgttctggaatcccggctgctttgaaacagtgctgctggaagctcctgaagggaaaggaggagagaggaaaagcaggagaaacttggtatctgctcttggacaaaaatgtcttggcagatgtcttggtgttgagggaatggtgccacctctacctcagttctccctcctgagccctgcatgagtgtgatgcctgcattgttcagttcaggtgttccactgattctgactaaatcaaaagtatacatgtaaatccagcccatctgttttcatgattgttaaacgccgtctcttctgaccactatgttataacattgtcttgaaattttgcctttgtcagagccatttctgaatacattttgtggtttagctggatgatgatgtaatgtttttaatgagcatttaattgaaatggcatctttataaaatggcatcaacctagctctttggaatattctgaaataagttccttgatcattttgtctctttagaaaatgagacatgcttttcttataaattgtggcttttcccacaaatattttcaaagagatttttgcagacaacattttcgggctgttactactaatgttggagagctcatgtggttttgtcccagatgttcacagtaggctggtttagtgactatgtttccagacctaatttggctaatcctatgttagttatgtctgttcctgaaccccaaccagatttcatgactgataggagtctggaagaacagactcacctgctgccttgggtcaggggatcctggagccacacataacactgaattgtctctaagagagcatctgggactgtgtttctgtctctctcattttatgacacttttcatgcatgccataagcatcatcattatattaggtttgtatcacatgcaatcacagatcattctaaatgtgacttagtattttatcaaaccaagcacatggagaacttgtgttaccttttctgttgttgttgttgtttaccctgtagaaattgtcctctggatttctgagatgggtaatgccctcctgtctcatctcagccctcaccagtgttggacctgatcctgaatttgcaaaaggcaaactgatctcagtctagttccggtaaatgccagccccactgatgcgatggggaggcgaagccttcttagctttctccttgccctttaggcctttgtgtaccagtgacgggtgtctgcgaggaagagcttggctcttggagaacacaggtttggtgagatcacatctctccatatgcactttggataaatttctttatttatagagacttttttggagcctatacatttgacccctgctgacctcaccgctgtagccccacccccacctcatcagctcacctttccacctccgcgcccaatacaggctggttttctttttgcctgaaatgttcttccccctctcaactgacccccaccccaaatatccatctctgccccccatactactttctctgaaattatgctcttaccatggtttgcacagacggtggataaatactgttccaaaggctggcttggggaacccaactattcccggtttggggttttgtccccctttgaaaaaattcacttgagattttaaatatctgactaaagtgaaaacaggaaagactctcagagtggtagaattgtaacagagctgttaagatttcactcagtgggaaggaatattttgtcagcaacttgctttaggaataaactggacaatcgaatggggcttttccagcctgcattaacagcaagctgtagcttggaaacacctgcatgacaaacactttcttaggacttcttttttccaggagtagcttattggcaggttttaacaagaaacgacacccacaggtgtttgcctctaaaactgttgaaacagaaccatctagtccccagggtttccctacagggtgtgcagggtgatgactgtgacttgtttgaaggatgctatcttttcagaggctcttggcaagtcccagaatctcaccttggtttgggactttctcctccaagggaataaactatttccagatggtgttagctttgcctagggaaggaagtactctttcctagactgaaaactaaaatgcaatgctgagttacctctccaaaacaaggaactgaaatattaggcttagcccatcttcattaaagtttaatgctcaaattaccttgtgtgttagcattttattgaatgccagtagcattcactgtcatgacaagttagaaattaatgcattgtcagccggatgccgtggctcacgcctgtaatcccagcactttgggaggccaaggcgggcagatcacctgaggtcaagacttcaagaccagcctggccaacttggtgaaacccccgtctctgctaaaaatacaaaagttagccaggcatggtggtgggcacctgtaatcccagctacccgggaggctgaggcaggagaatcgcttgaacccaggaggcagagtttgcagcaagctgagatcgcgccactgcactccagcctgggtgacagagtgtgactctgtctcaaaaaaaaaaaaaaaattaatgcattgtcaaactttagaagctacatttagaaaacatcctttagatttctctgtttctgctgttctgccaaattgccagcctctggtacatagtcttaagggttcccctccatgcaggtgttctcttcataggttaacattcagtcctgaatgatccaagagtttgtctcatgtaaaggccatccagcttcatgaattgcgttgctctgtgcgaatgcctcatgctatttattttattttcttttaaaaatgttttttcttttttagagactaagtctcactctgtcacccaggctggagtgcagtggcatgatcataacctcaaactcttgggctcaagcaaccgtcctgcctcagtttcctgagtagctgggataacaggcacacaccaccatgcctggcttcttcatattggttctctctcctgattgcgtagaggactgtatccgaccccaatgtctcctcctcagtctgacgggagagatgagaattctctctgttagacattctgtcttcagtgtatgttctctgtatttactccacctcctcctatttcttccctctgaggcagtggttctcaaccaggattgatttttgcctcccaggggacatttggcaatgtctgcagttatatttggttgtcacaactaggatgggtgctactggcatctagcgggtggaagccagagatgctaccaagcagtctgcgatgcacaggtcagcccccagacaaagaattatctggcccaaaatgtccgtagtgccacatttaataaactctgggctaatgaaatgtccacaccaactcagaataaaaggtcagatctccaggcgttcctggcactcccggagttgttcactttctgtgcttccttatgtggtataaaatttctgtcatatgagtctaattttctgtccaccgcagttctctcctggatatttcctttccattaggtgtcagtatttcaaatgagtacttcttagtctaattgtttttttctttgaaattatctcctgtcattcttaggagtccatttttctaactcagttaattagtacaaactctcatttacaaaatttacagtttcttggccgggtgcagtggtgtgtgcctgtaatcccagcactttgggaggccgaggcaggtggatcacctgaggtcaggagttcgcggccagcctgactaacatggtaaaggctgagacaggaggatcacttgtacctgggaggtggaggttgcagtgagccaagatcatgctattgcactacagcctgggcaacaagagagaaactcagtctcagaaaaaaaaaaaattacagtttcttactaaccatgtgaccttgaacatatttgacttctctttgctgcaccaagttcctcatgtgaaatatgcacataattatactatttcatgtagttgctaaagtattaaaggagctaatatgtgtaaagtgcttagaactgtgtaaagtgtttatataagatattttttaaacatagaatttcttggtcaggtgcggtggctgtaattccagcactttggggggctgagacaggtggatcacttgaggtcaggagttcgagaccagcctggccaatatggtgaaaccccgcctcttctaaaaatacctcaaaaattaaccgggtatagtgatgcacacctgtagtcccagctactcgggaggctgaggaaggagaattgcttgaacccagaaggtggaggctgcagtgagctgagattgtgccactgcactccagcctggtgacagagcaagactctatctaaaaaaaatatatatatatatgtatatatatatagaatttcttataatgtctaaaaattttgtttattgtgtgtatatccataaaatatgaaacatgttctatgtcctccctattaaacaaatactttgtatgttttagtccctgactcaaccagattggaaatattggtattagaagaaaattcaaaaagttgtcaaaccatagctacaaattttgactttcagcttagtctcccatgcctgctaacccttttgtctgatcagagttttctctagggccccttagggctaatgtaggtgggacttcaagcacatagatcattgctcttctcaattcagatggattaatgagcagatgggttgagatggagatgaggaaagacatcctaagctatgttgaggagggagaagatctgagactcaagtttctgctgttaaatccatgaggctgatttagcagctaagaatacaggccttagccttttagagttccctatctgataggagccttagagataactcagttgtcatcatttgcatctgatataaaaatctccattttatgggtggagaattgagactcaaaacctaaacttttaaaaaatgaaataatggcagagctggaacagagagcagggctgttattgggttttgtaactcttattacggggactgcctccactaaccctagttcccttctctccacctcatgttttctttgttttggaatatggtcatgtttcattgctgtcttttcttcctctcgtgaacttaaaatatgaatcatttggtaccaagttttcatatgtcttcctgtattcatatgaccagaaccagtcttctccatcccaaacaccgctgtttatctacatactccagccaaaaactttcttgattcctcacattcttttctaccctacatccaaatcataagaaaattttgtttgtttgtttgtttttataagagacagggtcttgctctgtcacccaggctggagtgcagtggtgtgatcatagctcactgcagcttcaacttcctgggcttaaggaatcctcccacatagctggaactacaggcatgcaccagcatacctggctagtttttaaaaaatttgttcatagagatagggttacccaggctggtctcaaactcctgggctcaagcagtcctcctgcctcagcctcctaagtgctgggattgcaggtgtgggccactgtgcctggccaaatgctgtcatttccaccttcaaaatatttccaagtggcttctgtccaagccactctgggcctgcattgttcaatagcactttctgtgaggatggaaatgttctgtatctgtactgcccaatacagtcgccattagccacatgtggctattgtgaatttaaaatgactgaggaactgaagtttttatagcagctttattgggctataactcatataccatctaattcattgaaagtatgcaattctatggtttttaatatattcacagagttgtacagccatcatcacaatacattatagaacatttttatcacccccaaaagaaaccctatattcattaagaatcactcctggccgggcacggtggctcatgcctgtaatcccagcactttgggaggctaaggcaggtggatcacctgaggtcaggagttcgagaccagcctgaccaacatggtgaaaccccgtctctactaaaaatacaaaaatcagctgggtgtggtggcgcatgcctgtaatcccagctacttgggaggctgaagcaagagaatcgcttgaacccaggaggcagagattgcagtgagcagagatcaagccattgcactccagcctgggcgacagagtaagactccatctcaaaaaaaaaaaaaaaaagagtcactccccatttctcccaagcacctccagtacctggaaaccactgatctactgtctgtctctgtagatgtgcccatttctggacattccatagagatggaatatgtggcctttggtgtctggcttcttcacttagcataaggttttcaaggttcatccatgttgtagcatgtatcagtacttcattcctttttattgcctaataatggtgttctatcatattgatataccacattttaccatttcacagtggatggacatttgggttataaataggctattgtgaataatgaataatgctattcattattttaagctattatgaataattataataatggtgctatagtttttaagtacaaggctttgtgggtttcattcatatgttttcatttctcttggatgtgtacctaggagtacaatggctaggtcacatggtaactgtacataacgctctgaggaactgcctcacagttttccagggtttgcaccgttttactttcccaccagcagtgtatgaaagatctaatttctccacatcttgttattgtctgtttttctgtaggcaccccggtgggtgttaagtggtatctcattgtggttttgattttatatttctttgatggctaatgatgttttgctgttcttcatgcacttactggccattttgatatcttctttgcaaaactgtctattcagatcctttgcctatttttaaattttttgggtggcctttttactgttgagttgtaagagctctttgtgcattttggatacaggtttcagatacataatttgcaagtacttttttccatttttcaggttgtctttttactttcctagtgttgtcctttgaagcacaagagtttctaattttgaagaagtccagttcatctacatttttctttcctcactgtgcttttggtgccatatctaagaaaccattgccagatccaaggtgataaagattcatcgctatgttttatcataagagttttatagttttacaactcaaaaacaaaaagtcaaatactgcatggcctcacttataagtggtagctaagtaacgtgtacacatggacatggagtgtggcatgatagacactggagactcagaagggtgagagggtgggaagggaaagggtgatgagaaattctttaatagatacaatgcacattgttcaggtgatggagacactaaaagcctagacttcactcccatatattcatgtaacaaaattgcacttgcaccccttaaatttacatcaattaaaaatgattttatagctttgtttctatgatccatttttaaaaatttttattatgttaaaaacatcatcttttccattttaacattttaagcatacaattcagagacattaattacagaatgttatgcaaccatcaccactatgtttttccaaaaattttcatcaccccaaactgaaactctgtgctcattaagcaataactcctccttctccccttcctccccagcccccaggtaggaatgaagtttgtattgtattttattttaattaatttaaatgtaaacaactaaatgcagctggtgattaccatattgggctgcacagttataacacgactagtatcatcctcttagatagactgctacagtcatttctaagctggctttgcatttattattatcctatttatggttatctatggtccattctcccataaaagctggactattcctttaagaatgtaacttattccatttcattcccagctctgaatcttccagtggttacctattacaattaacaaagaaatccaagctctttgttgtggtccacatttgtctgcccctttgactgtctgccttctccttttccttctcccagtgcctgcagccccactggtcttcgtaatgatccttgagctcatcaagtgctgtctgcattcagactctgcacagtttctctcctctgtctggaacactcaccctgtagatccccatttaactctctccctcgtaccattcagatctgctcaaatgtcacctcctcagaaagattgttccagagctccctatctaaaatagccatgctattactctaccttatagctcctgtgttttattcttattttttattaagacagggtcttacactgtcacccaggctggagtgcactgttgcagtcatggctcactgcagcctcaaactccggagctcaagcaatcctcccaccgcaagcctcccaagtagctgggaccacaggcgagcaccaccacacttggctaatatgtttcttttcttttcttttttttccttttttttttttttttttttgaggcagagtctcactctgttgcccaggctggagtgcagtggcatgatcactcactgcaaccttcacctcccaggttcaagtgattctcctgcctcagcctcctgagtagctggcaattcaggcaggtgccatcatgcccagttaatttttgtttttttagtagagacagggtttcaccatgttggccaggctggtcttgaactcctgacctcaggtgatccacccaccttggccttccaaagtgctgggattacaggtgtgagccgccgcacccagcagctaatgtatttcttcatagcacttattacacctgacattttatcgtgtatctgtttaaggttttatgtcctgtctcctcactagaccacaagctgtataaaaacagggaccttctcttcccggttttcataatagtgcctggcataaaataggctgtaagtaaatatttgttgagtacataaaagaagaatcttattcatttcaaggctataatctatgttagaatcaaagagatggtctccatactaaactgaagtatttcttcattgaggcaggcatttaaaagtgttgcacctgttagtaaaacagtcttaaggccagttcctgaaaagtgaactcctacaattttgagtaactatttgctaatacatcagcatgttgccttcttgggattaattcagcctttcttttacttttttaacttgctcccttccttcccttttaatgaagtcatgcctaagctccagtctgtccttgtcccctctcccctaagctttgagaccgttcctttttaagtcagtggccatgtctcgccccgttctcccgatataactcttactttacccagcagcggggcctccgtttagtgcagcccgtgatgttgctttcctggttcatcttcccttatccacagatttacctggctggaatcgggagactgtgtgtgcccaggggctggattcggagacccatgcttctgcagttccacttatgactccatcattatgctgttttaggaaaataaatagatattgattctctaataagagtgggattgttcaacaagcattgggaaaatctgcgagcccagatatgtatgtatagcagctactggttggaaatttgaacacaagcatccttatctacccagcctgcgggccacagaccagaactgagtataaaaaaagaataaaaccaaatgccacatgttgtctcttataagtcagaactcaacattgagtatacatgaacataaagaagagaacaatagatgccggagaacttgacaagagagggagagaggaaaggcttgaaaaactacccattgggatgccaggcacggtggctcacgcctgtaatcccagcactttgggagcctgaggcgggtggatcatgaggtcaggagttcgagaccagcctggttaagatggtaaaaccctgtctctactaaaaatacaaaaattagccaggcatggtggcgggcacctgtaatcccagctacttgggaggctgaggcagagaattgcttgaatccaggaggcggaggttgcagtgacccgagattgtaccactgcattccagcctgggcgacagaccgagactctgtctcaaaaacaaaacaaaacaaaacaaaacaaaaacaaaaaaaaacactacccattgggtactatgcttactacctgggtgtcagagtcatttgtactccagacctcagcatcacacagtatacctttgtaacaaacctgcgcatgtaccccaaaatctaaaacaaaagttggaagaagttgaaagaaataagaataaaggaaggttggcagtgtcatccaaggaaactaagcctgatattaaaataggctctgaccactcaggataaaaaacagacttctctgtgcaggtgtagcggagatgatgaaacaactctattagcattctgccttagtggttgttatagtcatagccatccttgaaaagaaaaaaaaaaaaaggaaaatataggaaaactgaggcttaaaatccttcttctattttctaaacttctgtcactggagtgcttgcgttcccccaggtgatagactccggaagctcatacagttgcagatgagaacatgagtaataaatacccccaaaattctttccaagttcagtcatgatgaattggtttaatatgcatgtagttatctttttattggtccataattccaatttagcaaaatgtaaagatgaatcataaagaatacctggaaaaagccccaacattgatggcacttaataaagatagatgagtatgttcttactcctttttttaaaacaaactggacaaagataaattttaatgtttacaaaaatgtaaatttcagtgcagatcaagcgtttggttggttggttggttggaagcttgactttatttgcttcatttggagagaatataagatgaaaaagttcatcattagaaagagaagtaagcattagagtcacaggatgggattttgaaatactctgtgagttgattgatgttcctaaagttccctgtttaatgctctgagttaaataggtggccatgctcagcttcttggatgttaatagtaacttctttgtttttcagatactgtgttgacaagtggtcatgctaccgactatttatttgttggaaatattgtttacacagtaagtttatctctgtttattaagccattcttaaacagcttatgtgtggcttgcacttctctaaacccttaaaaagggccttcctcattattattatttatttcaaatcttcaaaatgtattttatatatccttcaaagttcagaatggttgtgaaatgcttacatcatcgtttctgaaggttatgccaagtgaaggtttctgggcaggtggttaacagatttccccattcttcaaatgaccattttacacctacctgcaaaggaaaacaacactcaggaaggtggtatctcccaagctaagaaaagggcaaaactattatttatgagaaagactgttactagaatgaaagctcttctggaagtgaatctgcctgtatgtcccctgaaaataacccttagagaattagctactgacatggctggtgctttcaaaccggagctgccttggggaagctagttctggagtggagagatgggatttctcatggaaagtgaaaataactcattgagaataatgtgtttccaaactgtcttttattttcacagtatgttgttgttactgtttgtctgaaagctggtttggagaccacagcttggactaaagtaagttttctctagaattgtttctctgttcagtatagatatttttcatgctaggatttctttttaagccttggggaaaccataagcaatatctggctatcttctttcagattttctgtgtaaaaattgtggtttgatcttgatcagggtaaatttgcaatccaaagtctcttggtgattcatttgcttggcacgtaatacagctctaagctattaacagtcatctcacttcaaatgtatttgctcattgtaaaaacaaaaaccatattatacacacacatatatggaaaatatagaaggacaaaaaacatttaatgtccataattttaccaccaagagacagtcactgttaatgctttcctgtggaaccttccggacttcgttctatgtctgcatgtgtgtgtattttttaataagatgatgcattataaaacataggactttgtaatcccttttaatttaaatatatattaggcacattttctgtgacttaaaatacaagtcaacaaagttattgttcttgattaaagagtattacgttttacagatgtcccaccatttacttcatcactctcttattttagacattttggttatttccagcatttaaagattataactaaagcttcatgtgtgtctctcatagtgtcatgacctggctgctgtttaaatgctctgctaagaaaaatggggatggggtggaaggtcagtgaggaatcagggaatcccctaagagacagtggcaattaatccgggtcagaggtgatgatgacttcgcttacgatgttagaggaggaggtagtgagaagtggtcggagtctggattcattttatctttctaaaagctaacagagcttgcacatggattagattgtggggtgtgaagagagaaagaagtcaaggatcatcacattaagaggacaaagaagaaaaaatgaacaacgcagtagatgcttaaaggggcattgttaagaggcaatatccatttcagatttaaaaataaaaaactcttggctaaaggaatggaacaaagtcttgaaatgataaataaaaacatcttatttattttgtctgttcagccactctgttaccagattaatgagtccttgttgtatacagccgcaggttggagcaaacacttgctatgaactgagaggggcccgctgttactatgggagaaatcttagagtaaggtcacctgtgacagcaaaagcaccttcatcttcagggtactttggggccattcattacttgaattcattgttaaaaattctgagacatgggaattagaaagattgaacttcccattaactggtgagtcatcaaagtctttccataaggaaaggtagcttggatgcaaggattctgcagcaagtggagttggggtgaatctgccaggctggtcgagaagcctgtctgagtgtctatttccctctgcagttcagtcatctggctgtctggggaagcatgctgacctggctggtgttttttggcatctactcgaccatctggcccaccattcccattgctccagatatgagaggacaggtaagtactcctgattgggagtgtgtcttctgtgtcttgtgacagcaatgtttctccatgggcgggtgagcaggcactgtgtgtcttacagccacgatgagcttcaggagaggctggtccttcctgcttccatcagaatctatcaggagataaaccaaaccaaagcacctggaagaggtcatccagtccacagaaaaggcatttgaagtttcaagtattatgaaaactgtcaacttaaatcctccggcttattggcatgcccacatttccataataaattatgtgttaattacacacagtaccaatatgtacagttggaaaactggagctattttgaatggttcctaatccattgattatgttgattacagttttgatgttgtactctggtttgttgttatactctgctgggtcacctgtgacagatgaatctaacagctctatgaaccagatcattgataaaccagaatctctcattgttcatctctttgaactagagaggctgagattgaagacctttacactcatttgaatgttttttattttttccttcatattatctttgtccagtgcataagattgagccatcaacagtgacaaactgtatcctagaatcccacagtattgggtgtggagaggaatgagctgacagtcctctggtacacacctcctcagtttaccaaggaagctgtgcaggcccaggtctccaagcccaccccagagaccccaccctggagttgcccacatccagcactgcccttaaaccccaagaggctgctgggccctgtactttaaggacctctgctctggccttctgtggctgggtgtgttcctcggcacggagtgaaaagctatgatgcacagagtccatcttcccacttgtaatctattctctgggctcccaggaccccttgtttccttcccaaacagccaaaagcctcctgcccaggcctgcctggtcctctctccatatctaggccagtgtgcacactgggccaaaggggcagctgttttcaagggtgtgcactgagtagatgatgtttgcaccgatgttcccgcccacatttgcaggatgcttgtgcaggggcacagaacccagggtgggatgggaactgtgggtcaggctttcattggtgttcctgccccaggatacatactttagggccaggcctgttcatggcacacctggctgctatctctgctttacttactctgtagaaatgagcaaaacctcctgggtctatccaagtctggaccatgtctagcaactgtttctcgtgagatagcccagggtagcattacttgccatttcacctggtagctctgtcagctaatagcccaggtcgtctgagacctccactgagtgtgggtgctgagcaggacggacctgtcctataggagtgggcttgcatgtcctctagtgcatctttgctttctgtgaggaaagaggacaaacatataacatgcttttcagtttttttccaaatccagacagtagaggaaattagagggcgttcagtgaacccagaagattgttgtgtagcaaaatgagcattttccaacaaagatattttgtgtttaaataaatcagttctattttaaagcaatgtgattgatccccacaaaaagcaaaccaagaaaattatccactacaagacaacgatccattggtaaggcattggtgcttagaatatctgctttgtgttctcttccttctggttcaggatggatctgctgtgatgaatatttcatttggggaattttgtggtgatggacaatagatggggcctcagccaatggccatagacagtgttctaaattagagagtgacagctgacaggacggggtcgcttggcatgtgactgacagacaaagcccattcctttgaaagctcctcctgagtcctaaacagagagctgtgccagggaaccacatgtacttcagtaactccaaatgtgcgtgaattaggctgcttgccaactctcactcccatcgagataccgactttccaactgcagaaggaccaggctgatcatgcagctactaaggtgccgacattttcactgtaccagtcacataagcatgatggtctgtatggttataaggctcagattaatggtgacattcacatgtttaaggactcttccagcagaactttagtgagttgtttctaccatccgaaagcaaagaagtgatcatattcaaccacattgcatttttctgtaaaagcttatttttctttaaaacatgtcattttaatcactttattggttggttcccatgaagcagatgataatgatgtgaaatagatgatagctgggtgaaaccgaggttttcattaagcagtacatgagaggattaatgtggttctctagtggccggacttccgagtaggtactctgctgtctgagtctaaagaactgtgtatcatctctagccttcctccagggcagggggctcctgagtgggtaaaggggccaggaaatgtgtaactttagtgtcacagccaacttttacactgtttcacctgcagtctgccactctgtattttgactcagtgctttgttcattctttgaaaaatggcagggaagtattacaaaacatttttttaaacacctttgaaggattgcttgggtggatagtggcttacactagcctgaagtctcagaaagccttcctcctggctcaggaggacttatatgctgtcataaaaaagaggaactgggttcaggtgtagtcagtaaaaggaattggctcttttggggaattactaaaaacatgcccacgccctgttcattcctgggggtctaggttggtaactgcttaggagtaaagggtattctaggaaaaggccactttttaaaatgactgtttgaagaatgcttctagtgatttttataaaccactttttgtagttcactaaacagtaggtttttggcaagtgaacctggttatgtgaagttctagaattaaactagtgcctaatagcaaacagcatttctcactcagaagccagaaagagatttgacacacaaaacattctgtctattcataacatcttcagccattgaaaagatgcattgtttctgctgggggtttcctaaactaatttgattaaatatttctttgtcttgtccattatatttggagtttttctcacggagaagaatatgggttttcccttgagggcaaaggaaaggaagggctatagaattgaattattctacactatcaaagagtctttatcttccctaaatcacctcatgacatggtatgtgaaacccagccagacaacatgtcaggaagtcccagtggaagtttctgaaatcaaagaagtcatctgcatccttcccctcctgaaaatacgccacatttgtgggattttaaggggcatcctgtttttccgtttttctcttttgaagcttggatttatagtaataaaaacttaggttgtgtctatcctggggaatgccagtcctcggctatggaaaatacatgatgatgttttttttcccgtgggggaccaggtgtttttcttttccccagtagaataaccatgagataaaatgggtccccaaagcaaatacttgaaaatggaaaatgacaaaatcccttaggtcaccaccttccccaaagttgcctgctgaagtagaactttgcattggaaagatgatggaaacttgatcctagaccaggtcaggaaatgtgtttctgttttcttcatgcatttcccagcacttctgactttagtagtgctggagggaatgccatcttacttgacctctgttcaaaagtccggagacctggctctgttcatgccccagctatgatagttacgtaaccattggcaaatcattttacttgcattaatctcctaatcagcaaagtcagaataatgccacccaacctaattactttagagaattgtgatgaagatataataggctaacctgtgggaaatctaaaacatggatgctcttctttttcctggagtgatgaattgtttttgaaccttcatcaataagaatattgctgtgatttgaactccaaattcttttagccaaagaatttgaacattttataggttctaaatgggatgtttttgagtaaggtctattgaccacctgcatccaaatcatctgggttgcttgtcaaaatgacaacccccaccccccaaaaatatgtgcaggcaatcacgtacacacacagagacacacaatgcacacacacagagagacacacacacagacacacatatacacagacacacatagtgaattgcaaactctgggtgtggagccccagcatgtgagcttcagtaaatctccaggtgattcttccctttaaagtgtgagaaccactgctttaaaacacctaaaatatgactctattagaatgttttagctcctgctgggtgttacaggagaagatggtacactgaagatacagctgagtgattgctcatgttaagtggttatgtaggatgccagctggtgacggtgaccaccgtaagggcagctagctttcaaagtagggaattacaccacgagacatgaaatcgttaaccatggaaaaattctcctcactaacttttgctgcttttcctttaaagttcttttcattgctagtaagagaggggagaaaaccttttgacttcaaagcatacaatctgcaactctgcctgcagtgacaagctcctgactccagccagtttctggactgggacaggcttttttttttttttttcattctaaatacaggaatgggtttactcttgagttttatgtacacacttgtgtacacacaatgcaaatcccagtggactgtaagtaaacagagggaggaatggttctgtcatcagtgaatcagtgattaattcctcatcttctccaattgtctcccctggatttgtagcaggcctaggtatgttccatgtgaaatttgcaaagactgatgtttgtttaccagttgtatgtgctctaggaggtaagctgagaagttggggtgatgtcaagtaggtggccatctttgctcagctaccattccaggatgtctgtggaggatgggagcttaacggtaggaatccacccgagggtcaggagaggacttgttttcaggttaaggtctgtgtggggcatgtttggttgtcccacatccatcctccttcaccctttcctaagggtgcctagtgtgtattcactgatgtgctgtgacttccacccctaagtccaggtgaaagcttcatcccatcccccctgccacagtgagcgggtcaggaagcctgaaggagacacagggagacacttgctgggggcttccaggatagcagcgagtttgctcctaaaacaaatccatgaaagagctggctttcccatctgaaccatgtgggtgctgctgtgatgctgggaatgggtcagccacaggaggaaaaccaccctcagaatcctactatagcctgaaagatagactaggaagacaaaaagacaaacaaaaacaaaagtgtcttttttttattgttttattactttttatttgacaagtaaaggactccaaaagtctctatgcaattgttgagacactgtatgaagccagcctcgaagcccatcccaggtggggcgctcagtgagaatttcctgtgtgctgcccggccttgtgggtagccccggccaaggaatcctctcttcacccaagtgcgggtgttgggatgttcccttagcttcctcagccaaggaaataaacgcttgttaaaaacaagcttaggactttagcatatttaaactgttttattatactcaaagttacagattggtttaaggagctggtaaaaattactttagcactgcaattattagttttttagataacattccagaaaacactgaatgagcatatcttaaggttactggaattaatctttaatgcaatattgaatagactcggtccagttttcctcaagtatcgtattttagaaacccgtggcatggctggtgaggagcggtcagcctcgtcaaggaggaagtcctatcagcagagattcacctttcggtttggaataacatcgtgacatctttttgtacagttttcttgagtattgaaattggcccaattattcattgaagtccaattcacattctggcttttcaactcgtacattttgtggaatagtgagactcatttgcaagaagtaacacactgtgtttctggatgacattctcatctgaatgcaaagcacaatgagcgaagttaagacagtaccgacttcctggcttctgctgcacctgtgactgttgtcgcctgcaccccagggtcccccatccgtgtgcatttccttcctagaaggctcccaacaccagtccctttctgaggcaatccctagaaccaaaaacaaaactatagcaacaacaacaaaagcactttgggaggcctgggtgggcggatcacaagttcaggagatagagaccactctggctaacacagtgaaaccccgtctctactaaaaatagaaaaaattatccaggcatggtggcgggcgcctgtagtcccagctactcggaaggctgaggcaggtgaatggcatgaacccaggaggcggagcttgcagtgagccgagatcgcgccactgcactccagcctgggcgacacagcgagactccgtctcaaaaaaaaaaaaaaaaaaaaaaaccttttaattggtaataaagaaaaatcagaaacattcagttgagcagtgctagctaagtgagttctcacagcctgtaaatatttggattctaaaatcagaaaactcaggcatccatcagacaacagttctgtcagaattggcttttgtcatggttacacataatgccaacttgtttttgtttttctcctcctgcttaaaaacaaaggagaaagttttttaagttggaagctccttaaagtggtttcagattctttctacaggcggtgatgggaacagaactcccgttatcctaattgcctctggattctctggaatcctcctggattaaagtgacccgaatccgatttctttcttatttagtgcaaattgtaactgtgaaagtaggatttgaactaaattaagctaatgcctaagacatttatgaagctaattctattgtctgtaatatccatacttgcgttatttctgagcttgtttttcaggtatatgaaggagataatatctatcttaggatttaatagggaaattaaggaaaataagacatgtcagtaacagtaggtaatgtttattgaacaattgagatgagaaaagttctcttgtccccctggcagggcgtgtgagaggggagtggctcgcttcttcagcgccccgctgctcagacctctaggggagcatacagatgggcaggctgtggggttctgaccccacggtagtgtctaggggtgaatgtttacagctcctgaaccccagtgggcatgtgttacagggtactctttcagtttagctgtccgtaggcagcttgtgtaaaccagctcagttagaccctctactttgtcacaaggacagagggctttgtgtatcccaggttcttgccttggtttaccggaagaatcagatcacacgtgggcttggagaatgagtgcaaggtgttattgagtggaagtatctctcagcagatgggggagccagaagggagatgacttttccctggagttgagccacttgacagcccggctgtcctccaattgttctggccaaactctgtgtcattctggcgataggtggcctgacggcgcgcgggtgcctgtccgtgcattcctctagacatctggctttccagtgttcctctgctgatgtgtttctctcaacgtccagccacctctgtgtctgctggctagggtctcgatttttgtataggcacaggataggggcgtggcaggtcagggtggttttgggaaatgcaacatttgggcaggaaaataaaaatgcctgtcctcacctaggtccctggacacaggcctgggggtggagccctagccagggaccatgcccttcccccattctgtatcatttaaagggaccactcccttcccttcccagcacttcccttccatatcacaattactacatatcagacaaaacatattcatgaaaatatgtttaatatatgcagttacatgtgtaatgaagtaagcattggctcattcagtaatctgcaaccacatgaggaaactgaggcttagagagaaaggatcagtctcttgaccaggcagggagtagagtggctgggattcttctggagtcggttggactccaagctgggtcttctcactttgtgactatggaaagcagctacagtgatgatgaaccaggtgtttgagaaatgttgctcaattctccttaacgttttgcttttaataaattttatctgaagtgacttaccccgcaatgcaatagaatttttaaaatatgaatgttgagttagaaggaataagcagactttgtgtttgagctgcaatcttctgtccacgagcccaatcttttttaaagtaaagcaggtttcaaacaacaggatttattttttacgttcattatagaaagccctcatttttttagtccttgtcctcccttcccccgtatacaatttcctccattttggcagtttattttctttttggcctctcatttcaaggatgctgtgtgttaattagaggccccgcggctttgattgagtggtttttttttttcttcagaggttttgttgtggtgttggcatttgtcattcattctgatgttaatttttaaaatatctgtcagcaaattaaagtacacattacatgctgattttgtttgtttgtaatatttatgctcagtggtcacagtgtacgtctgatgtggttttgaacttttcctttcttgaaacatgtggaaatgtgtatgtgggccactcttattaagagtctgcacaggggttttcttctccaacatcttcagagggaggtggccttgtctgatgactggaggttatcatcatcacagttcccccacccagagatggcagggatcttcaggtttatccaatttaaaaggtataaaagtgccagagaaaggccaccaagtccggttatgcaagaaaacatgaccacggtaggttagagaagagagaaaagagaagcatagcatgctattaggcatgtaccaagaagtttctgtttcatataaatgatgatgcaaaagctattgtggacagtatctgagaggcccaaaatactgaacagacttaaaagtaggggatattttcagtgactattgcttacatcatcattgtaacatatcgaagcatccactgagtaaattggatgctttctgaactttgattagccagctgtcataagtgttggcattcctttggctaaagacaagaaagagaaatctaggtcgcttgtgtctgtgcttgtatgtatacttcgattcgcaatacttttttagtgactgaaacctgatttcaatgcaggatggaaactgaaagacaggcatatttaaatgtgcagagtgctttctactgtgctctgaagacaaaccctatccactttgctcagcaggagcaaagacatctctcatgcagggtacagtgacatcttgccatcttccgcctgccctgcgtccattcccctcacccccccgccctctttcggaatgcgcattcaaatggtgctgcttctgcctctttgccacctctagggtctggatctgtgacccaaactggtcagccgggtcctctgcctcactgaccatggcagttgattcaggaatgcacatggtgccccaggctggagtatcacctagagacagttcaaggattttttacagaaactaattgggggatggagctcttttgctgctgggtctcttataggaggacggtgtcagcctggagcggctaggacaccctgcagaaggtggctggctgaggatgaattgagcacagaggaagggtgcactgagagccatcagcattgagcacacccctggatccagctctgcctgaagctagagccatctctgacctgttagatattgtcgttctatagcagaaacacagttggttccattttcctaccatgcatctaccaagttggagtaggaagggactttgtctactttttatagacttcagtatgtccttcccccagcttctttacccaaggaaaagaagacagcgttgggtagaagcgaattgtttgaaatagagagggaaggaaataggagcttttctaagcgaggcctctttctcttggcagccaacaattctaactggcttagagtccaatagtcctgagcagtgctgtccaatagaaatataatgggagacttatgtataattttacattttctagtggccctattaaaagaccaaaaagaaattcattttattgatatattttatttagctcaatatttccaaaatattatcactttgagatgtagccaacataaaaagaagttagtgaaatagtttgtgttcctttttttttttgtactaaatctctgaagtccagtgtgtgtgttgtaactaccgcacatcttaagccaggctagacgtatttcaagtactcagtagcatctggccagtggctgctgtgttggacagcacagctcttgaccaacgcagatctggaaatgcagattcactccccaacgctaaatttagtgcaggcaagatcaagaggtaggaaactcagcctcagcccagatcctccaggttcctcccacacacttggggtgtgcactgcctgacttctattttagtcactcatcattgaaagggttttggctcttaggcaagactttccctaaaaataaaacttggggacaactgagctcttaatctatgggcttattaattgctttaagtggagtttataaatcaagatttataaagtgtggatctgactcaagtcatttttccacaatgttggctaatcattttctcctgaatgttggaaggaagaggtcacgacttgggtcatacttgtgtcacactgcaaccagctgagcaaaaagaatccgtgccactgaaaataggttaggtctgttccttctaaatggttcctttattatgtaagtgacaatttctaagcaagattattatttaatgtctaagattgtgggaacctctcacctttgtgtcctttttgagtttcagtcctctcccctcttattatgatgaatccaggctctgttatttttaccccctaagtatctcttttttttttttttttgagatggagtctcgctctgtcacccaggctggagtgcagtggcgcaatctcagctcactgcaagctccgcctcccaggttcacaccattctcctgcctcagcctcccgagtagctgggactacaggcgcccaccaccacacctggctaattttttgtatatttagtttcaccgtgttagccaggatgttgttgatctcctgacctcatgatccacccccatcagcctcccaaagtgctgggattacaggcgtgagccaccgcacccagcctttaccccataagtatctcttaaatatatctgtttccacccagtttcatcccatccagttagtttgcgcagcatcatttcttgcgtggacaattgcagtagtctcatgactagttcttagcatctgatctgcctggacccattcctctaccggagccagagtgatcttgccaaatgtaagtctgatgtcattgttccctggcttcctgttgccctcaggataaagcctggggacatttacctggcccctgaggccctgcgaggcttaccactgctccctttatgctctccctcacctcatccacactggtggcttcccacttcctggtgtgaggagcgagctcctacagggcgtttgtgcctgctcctctcacttcctgactgcactggtctccgcctcctaccaagttaatgcttacacgatgtttagatctcagatgcttgatcacttcccaagggaagcctttcctcacatcctggacctacgtgctcctattgtatgttctcttaacacagtttacctttcgcttgttgtataatactcaccacaactaaaactctacatactaatgtatgaggtgtcatctcacacccattgggatggccactcttagaaacacaagaacagaaaacagaaaataagtagttggtgaggatgtggagagatcgaaacgcttgtgacctgtcaatggaagtgcaaaatggtgcagctaatatggaaaacagcacggaggtggctcaagaaattaaaaatagaactaccatataatttggttaccccacttctgggtatatacccaaaaggattgaaaacagggcctcaaaaagataattgcacactcatatttataacagcgttattcaaaacaggaggtagacacacaattcaaatgcccgttagaagatacatggatgaacaaaatacaatatatacacacaatgggatgttattcaacctcacaaaagaaggaaatcctgtcaccattctacaacatggttaaagttgaggacattatgtaaagtgaaatattctaacatggttaattaagaattgaggacattatgcaaagtgaataagccagtcacaaaaggcaaatactctatggttctgcttgtatatagtgagtactcgtagagacaggaagtgccatggcagttgccggggctgggggaggggaaatgaagagctgctgtttaatagacagagttgcagttttgccacatgaaaacgttttagagagccgttgcacaacagtgtgacttcggttaaccatactgaactttccttaaaatggctaagatagtaaatcttaagtttttatcacaattttaaaaatgtacgtttgtgtgatttactgattcatatcagcttctctctgtaaactggaagctctgtgagtgaagtgaatattctcaaatatatccttagtacctagtacccatctttttttggtattcagtaaatatttaaatgaaggaattcataacattgaacaacctctcgtgtacaattgggtgggtctgtagttggctctgtgcagttagtgcctggtatctgtttgctgcattaacacaaacagatgccaagtatttcagcatttatacaattataattgtataaattacacacaggatctgcacctaagaagtgattaatagattaatgaatttagcatttttcttaagagaagtgtgtgcaaaaagtcagtaccacaaaccatatatttttttcacccaaagaatgatagacacttccatttaaaatttcagcccaactgttttagccacataggtgatgtctgtggcatgatattcattgatattggcgtttggaaacagttaatagtcacacttaattacttcatggaaaatgtttgttttggagatgatattaaaggagaggcataaatgaaattaagatgggtatttttgagcacctaattccaggaagtactacgctaatcattctccgatagttttatgataagagattaaaactgaggaagacagtgggccacagatggcactagcagaagtttatgtaccctaaaccaacacatggttgggcagcattgtcattatgatgttcaagggactgccatttccaaagtcataaatataagcgtgtagttggagacaggttttggttgagaaaaatgtgacgcatagatagcagccagcctccaataaatctgggatgatttcacggaagaaatagaacttctctggggcattgttcctcagcagatcagggggtgggtgctccaaggcccgctgccttggaagaggctgaaagtgaagggtggatctggccctgccagctcagttgaggcgtaggatttcagtggcaagtaaagctgtattacaagagaagaaaagtttaggatttggaaagtctatccccagcacagcatcttaattaaaggaaagagtaaggaaaagcagagagtaaagtggctgtgagtgcagtaaagaagcagaactggggaaaggagagcgagggaggaaacagtgattgataacgggaggacgaggagcctgactgtgatggggaaggccaggtggagccatgaaacctggaaggagaagctttaaaaatttcaccgcaggaaattacaggcctgttgagaaactttactacgtatggcatcaaaacagagtaagactgaccatgaaaaaagatcctttaacatagtaactcggaattttgcctttttatgattaatgtgggaaaagtaattcttagaaataaaaggaaatggagggaatatcaacatatgaattttattttgtgctctttttctgaatgctaaatcgtttaaaatgaatccttaataagaaaaaggaataagcctttgtctggaatgtaaagaaagaaagaatttttccactattcaaatagaattaaatattgcattggggcattgtaatagttttctataatataaactaattgattctaagtgagattttaaaatctaagatgagcatgattttggaaaatagctcattattgctgaaattgtttcgaacaggaaatataaaatcaagaagcaactttaaataattaacaaacttgtctacttggggatttatttttatttaaaaaaaaaaactaatccttttttcccctcaatgttttcagtggttcaaacttagtggaataaacctaatgaagtaatattctcatacatgatatgaaagtaaatttgattcaagcttttatgtagttcttctgacataggtcatcttagtgacagattgccacctaccagatgccattttaggccactttctcccccaaaaactttttttaaaaaaggaaagtaattctctttattcttcagtatcactatgctagagttaggagttgtccagaaagttacagtttgggtccagatggtctacagagctcacctctttgtttttaaaaattcgatagggtgaaatgagcttccaacacttaaagctccaatcatggaacatctgactcataaagcgatgtttgaagctgtattttttgtgacttctccatgttgttttactttgtttcattgagttgtttatattcattcgtgttgtatgtctcttgccttctttaagttagttcttagttgtctttccttttgatgtccttggcaccgacctggtcctccccccgaccccacaattctgtttccagttcagtagtagttacttaagggtgtctcctcccatgttccttagagcaagtgcctttctaaactttcatactagccatgtggcataagtgtctgtttagtttatctttcccaatttttgcctagagactcctcttaagctgtttactgccaaaatcaccattgcagttaattctaaagccattgtataagcccccaagcccttcagacatgtcaaggaaagtagctgtgttcattaaggacaatacttagtgctttcaattgctgacaaagggaacatgctgcatttccagcgacttcctaacagtgtcacctgtgtatacagagaaccctcaaagacctgatatgtgtatgtcagactcagaagattgcccaagaaaataactagtttgctaaatggattgtaaacaaaatgttatcagtttaacccctcacttccactcagctctagagaagaatgggggttcacttacgccctttagatgagaaactttttgaggacagcatgttctgtagcgtgaagaagacaactcgggaagtgtctaaggaatggaagacaagaaggaggggagggccagaagagaaaccacaggagcccccttctcagtcaccgccagttaggctccttcagacaaccctgtgacttgctttataaggtatgtcgaaacaaatgaacctagatcattttgagtaattccatgtcatccacacacattggcctcccagtgttacaggaaagaggtcccgatccagacccaagagagggttcttggatcttgcacaagaaagaattcagggcgagtccatagagtaaagtgaaagcaagttttttaagaaagtagaggaataaaagaatgactattccataggcagagctggtgggagtgtagcagtgagaatgaacagaggtcgtacctgtcaccatcttggtttggtgggttttggctggcttctttattgcaacctgttttatcagcaaggtctttatgacctgtattttgtgccaaccttgtatctcatcctgtgacttagaatgccttaattgtctgggaatgcaagcccagtaggtctcagcttcattttacccagcccctattcaagatggagttgctgtggttcaaacgcctctgacaaccagtacctcaggctctcaactctctgaagcacagttcctgccttcccatcgccccagcaccttccactcactctgtctccactcacgtccatcaccacttccccaggcacaggagcttaaaaccatcagctgccttcccactctctctccctcatccctcacatccagagcagggtcatgagtgttcactcctgcagctgtgtcgtttgtgtgtcccagcatttatagcattctaccaccggtctccttgcagatcaccatgcgatttgctcccagagggcacaagccatgtgcacacatacttggtctatggggcatgtggacggggcaggagagcagagggcatttggctctgaggacaagaatttaagtcaactcaaagaatcaggactttgtgtatcttcttttgttgtggtttattcccacaaaagcgtatcttaaactctcattctctgctagtgactctttttgagaaatgctttatcgagcacctgggacaatatctccagtggtgtcactaattgaaggtggctactgagagggacagcaggaggctctcttggccactggccttgaccttagaagttcagggctgtaacctaaacatgctaaactttattaaatatgccagccaggatctttggttacaatgaaggaaaaaaatggacgttacttaataaacagaaaaagaatgcatagacagttatcatgcaatccatagaatatatgaaaaagccgaagaaccaggctgagaaagctggtagaagccaaggaggctacttcggaccacctgatcaagacccaaccctagcactgccaccactggatgtgcacctctgctggcgatggattctggactccaccctccaagtaatctttgaggtggccagtgctggcaggcgcatctgatggacaagcccaggtctcccactgtgcaccagctgtttcctttctgcagtggttcttcaagcagatttatgcaaacagccccaaatgtgttttaggacagtcctggcgatacccacattctcctgcaaataataggaggaaaatgtctttttcatttggcttccataggggaaagagttaggaggaaaatcctagactttttcttgaatatcttctcccagtgagaagacatatttgcctaactcaatcgataattgattaagtttaagaaattaaacttttttgaaaattcagtaatgcacacagacaaagcaagagtttttcccgtgagaaaaataaggcagacctgagcttgatacactttaaaaaggtaggtggtgaagaagaggtggcctcctagacaaagccacagcggcgtaggcctgtccatggagtggcctgtccatggggtactgttttgggcacagtgacagcaaggaataatcagttatcagataatcctaagatcagaaattgactacatgtaatcatacataattcgtcagtgtctaaagcaatttgaataacaattttcctttccctcacgcttccaagaaaatccagcggctaatccatagatggctatctcttggcaaactttgctttttgtgaagtagccacatgtcccatcagattaaaaagtgtaatttctttgttttcacaggatactgtccagtcaggaacaacaaaaaaaaaaaaaaaaaaggaagaggggaaaaatgtgattagtattatgtcattttattaatgaaggcactggtagtttcacacttaagtaaatcagttattacaagcaaggaaagttgctctccagccataatcctgacaggcctcaggggtattgaaaggttccagatgacttttgtttttgcagcagaatttaggcattgtgaacttctttctagaacacaggtcagttcatataaatctgctggaagaacctttacaataaggaaatggtattgataagctaccatttttccattcccaggagctactatttattgttacaagttacgttcccctaaatgaaaaaggcaacctcacctatcccttcatgcccccaaagctattcagcataagttaatcttttcaacagaagcagccaacttttctagcaaaggaatttgcagtctttgtggtttgggtaaaaaggtggctcattttaccagtttcttgatgaaatatgtttcatgataaattcaatctttcctcagaaaaattccccaaatctacttttctgtgcaaaattcagcatgaaagcctttctctgttgaagcagccaaagattgagtttgtgtagacctgggcaaacagtttcaggtccaaggttaaggatatttattgctggaggtattacatgtattcgtatccaggaagaacaaaattcaacaccttgacactggttttcaaatatattaatttactttcttttgtttggggggcatttttttttctccctgccctccttttaatccttttccacacttggtagaatgtggaaggatttttgccaggggtaactagcaaagctatacaatgtgttaatacacaggagatctgctggtttcttgcacagacttcagagaaagctgcttgcactctgactttggcataacatgcaggaaattcctcattggtctgcccaatgcaataaacagacctcctgcatctaaccacatccatgctgaagtttctcatgtggggttgcttttgctttttctgtaaaagttaagggtcccagcattcccattccacactttctttagctccttggctttggaatttgtgtaggactgtgcttgagagttaataggacttgtggctttattttttaatgttcgttatgtatacaaaaaggatagactaggtaaacgtgtcctccatggagagagagagagagaaagagagagagagagagaaagagagagagagaatagatgctcttgatataccttacagcttgataagaaagccagaagtcaccatttgcctgtgggtactctttagggacattgcttgctctattcactgcaggtgtttccctcagtaacccctgctactcaaagtgtggtccccaaggcagcaacatcagcctcatcagagggcttgtagaaatgctgagtctcaggccccagcccagaactactggactagagtctacattttaactaagccccaggtaattcaaagaacctaaaaggcagagaggtcctgggtgatacgccatgccaccagagtgcctgagtccatttcagtaaggacgccatgggagggtgtgaggggaaagcaggctgaccactggggcaaagagaaaaaagagcctggaaggactcgcctgagttcaattatgctcattaattcaatttgaggcaggaatgtgtgtaaataaacgctggcagctgcagcggctctgtttcccgcagggctcaggcaggaatgcaggggccattggacgtaaaaacctgactcggcattgggtggatgtttctgcaaccacgagataatgacggaaaagatggtattatcattatcgtattaggaaagtcttaatgcagagttaagtgccaaaccaagtggaactggagaggctgtgttagcatagataaaatcttcattatttgaaaagattaagcttacttgactgctccctcttctattttttaagtcaatacagatcggatttccagggggttacaatgagtaggacagcgccatggtcagacgcagcctgtcagtgtttccaagtaaataacctgttcgcatccactttttctcatacaaaaaagactaagttcgtgagaaacaggaaagagaaaattgaattatgtaggttaagaacaactccattgtaccataaacctgtgatatgtttattgtttaatttttggctcacagtgtgttcattcattgttttgagggctaggcagtgatcaccagttagccagttaatgtttgttaaaccccatgcggcatgctgggcaaagacacttgctcacttaaccattggaagatggctcttgtttgtactgtcatttttagaagctcattgaatattatgaattctaaagagatgtctgttttgcagcttaaaaattagccacaaatcccaagcgtctactcactgatggaggggcgctataaatgaagagagttgtgttcttcttaaactgggcatgttgtccttaaagcccctgtgcctgagatgatgatgatgatgatgatgatgatgatgatgatgatgatgatgatgatggtgatggtgatgatggtgatggtgatgatgatggcagcagctacccacaagctgggcactttattcaagctatatatatttaattcacactgtacctattctctatgagaaaccgaaaccaagtcctagtgaagttaacagccctgctcaagatcacacagccaggagtggggctgggctctgacctcaggctgtctccagggcttctaacagcagccattcaccctcagctcccctgctgtctcactctctagctctccctctccagtgtgtggcatgctttctctgcactctcagagctcgctgcatactcttatgaaaaaatacaaattagctgggcgtggtggtgggtgcctgtaattccagtactcaggaggctgaggcaggagaattgcttgaacccaggaggcggaggttgcactgaactgaaattgcaccttgcactccagcctgggcaacaagagtgaaactccatctcaaaaaaaggaaaaaaaggagaaaatacttgtgttatgattacaaactggggtgtgtgcaagtctctcacccactggactgtcaggagttttagagacgggactggcatggaataagccctaggttcacagcaattccttcctccttcatgcggacaggcccgtgtcttcactcctgtgccttgcactggtcctgtgggatgactagagagacagtctggcattgccaacatgtagtggacatctggggaagagtggagaacgcttgtcccctggcttctcccagcttcttgtcacagccagagaaagacctcccctatcagccactgcaggtaaaaccagagaaaacctcaccacctcccagtctgctgcactgcctgaagcatgtgtggatgttgatgtggcctgcgtgtgcaagtcagggtcatgcaggaaaaccttgcaagttcctgagaccttgagcgaccttcttggtggagacactgcttttaccttaggagaggtgatttaaaatctggctgagaatgacaggaagcagagcaaggagtatgggtctctggttattttatcccttttgtgcacatggccttttccctttaggagaaatggagttcagggggccagaaagatgagaaatggggttcttcagacttacctgtctaggccaccctcagtgttactcccttgtaccgacatggtgggagaatggttaatggaaggacagtggggcctttcactcctgcctcctgaacctccacctttgggagggtcagtggcccttagcaaaccaggacaagttggagttacatgggtctctgttcccttctccatcacagcagctttgggaaggattcaacaagtttatgtcagtccttggggattggggatgatggctgcacagtgttggaggaaggaaatcatgtcgggacctcattccctgccactcaccacccacacgccccactcccaagtattcaagggccaatttgtttgtggataaagcagatcccccgcttctgctcccacttctcgcgggtgccttctagcttcctttgctcattagcaggctcttagaaggcaggctgcagaaggaggcaagagatcactccaaaatcagaagtgctttggctggcacttcccagcagcttccttgggaagatagaggatgttgtgatcgcctggtctgggacagtgatgagctttctccctcctgatcctctgtcagatgcaggcagtccccgctgctctgagctcttcaactgttactctaaccttggcctgagactctcctaagcatgctttgaaaagtaaaattcgtgagaatggggcccaaacatgagagcacctgggtgaacagagtttgatttcattgcccctgcggcttctcctgccccactcaggcacttgccctcctcccacgagccatcccagatccctggggcccttctgcatcacctctgacgagtccactcttgtcccctctcctggcctctgccgactgttgactctgcagggaacacaggaactctctacagagatgtaaggggcttgatgctgtgcccttgcctgcatggccttcctgttactttgtggcagggcccactatcctgagctggcctccatgtcctggtctgcccagggctcgcttcctctctccagcctgagagtcagtctcctttctccgcttgcttttttttttttttttttttttttgaggtggagtcttgctcttgtcacccaggctggagtgcagtggtgcgatcttagctcactgcaacctccgcctcctgggttcaagcaattctcttgcctcagtaccccaagtagctgggactacaggtgcccaccagcatgcctggctaatttttgtatcattagtagagatggcgtttcaccatgttggccaggctggtctcgaactcctgacctcaggtgatccatctgcctcggcctcccaaagtgctgggattacaggcatgagccaccgcaccaagcccgcttgcttcttttctctaatgtctcttttcctgaccctggccctctctccttcttttggggtggctggcatgcttctcacagaggccatcgtaaaggctggggaggagggctggagcctgctggggtaatagtgcctgtcctgcccagctcatctgcagagcccccggggttggcgactgcagcagtctcagcacatcagtcccgaaccagagaaattgcagtgtcctgctgtttttcattatgctattttcttcctatttattctatggtcttgtttctcttagaattaaacaatcagaaactgatatgaggggaattcaatcagagcagggtatttgtggagccagggcatttctcctctttgacacagccacatggcttgttttcatgcattactccttaataatgtgtttatttatctagactcacacgattctctcttgccctgggtaatccactattaaccgttaataaccaggatccctagtgaaggaagggatttttcaaagaaaagcaaagggaattgcaggtttgaaattctagagagaatttcggtgggggtgagaatacaccctcactgaagagaatgtgggaaaataactgagagtgctcttcaagaggcagatgttgtacttctgctgatgctccactgtattcaagctgcattttgtttgaaagaagcttttcctccaagaatattacagtagttagttctgaaattgacaagcaatgttatatcacgtcttggataaagtatatatatttatgtatctgtaactaatgaatactgacattaagctttccaaattacttaataggacacctgtccctcccaaaagaaaagttggaatgtcggggtggtgatggtggaatagcgtatttgttgctgggatgaggtcataaagctaacttaactcttgttctgaaagagtctcagtgtggaaacggtggcacttgccctggctgggtttgactgtgtgagttttgtgttttgtaattagaagggaggtgtgcctctgctttatggacaatgcctggcaaatgctgccctccctatttttgtcgcatctgcaagtgtggtatgcatcttgtaaacaggtcactaattccaggctaggggctggaaggcagctataatctcgctcacgtggtttcacccgctccatgtgcgctggatgccgacagcacgaggggaagcctctgagagcgcggcttcgtggggcagagcatctcccaggcccactccatggaaatctcttccaagtggcagcccagagcctcttcgtgccatctgatagctgttccatagcgtataggaaaacagctgagactcagggccttctccagagggagcgccagagattactgccaggagagtgggaaatggtgagaaaaacatgaggtggcttccactctgcaagcccttagtactacataggctttatttacatggtattgctggttgctcattgtagggtcaaatttatgaagaaaggggtaatcagctcaggcacattgacaacagctggtctgctagctgacccagaacacttttccatataccagccaacaatgcataatgtctaagtaggctctataaacatccattctgtgtgactcatttgtgtaaagttccagagcttgcaaaactaatttatggtgttggaggtcaggagcgtgggtatgcctgggtggaacagaggatgagtaagaaatggaagaggtgtgaggaggcttctgctaagtgtctggggttttttcaaatctaagttctgtccatgggtattcattttgtgaaaatggaaagtcacttgagatgcacacatgtgatctgtgcactttatgtatgaatattctacttctataaaaagtttacactaaaggtatgacatcagatcataaggaaaaacttccttcctcagtccaactctttttttttttaagacagagttttgctgttgttgcccagactgaagtgcagtggcgcgatcttggctcactgaaacctctgcctcctgggttcaagcgattctcttgcctcagcctctcaagtagctgggattacaggcgtcggccaccatgcccggctaatttttgtgtttttagtagagacgggtttcaccatcttggccaggctggtcttgagctcctgacttcgtgatcttcccgcctcggcctcccaaagtgttgggattacaggcgtgagccacagcgccaggcccctcagtccaacttttattattaataaattcagacaagagaggaaaggaagacaacaaatgttaatactatgtgtcttctacatgcaggccctgagccaggtgctttctttacatccaccctgtgagccatttagcttttaatcacttcttattaagttttgatttgtctattgaggattcccagtttgtttgtgtttttttttagtttgattcttttaacagaccaatgatcatatcaatatgtttttgaatctcaatggaatacttttgaataaatgcttctgtgggctgcttatccaatgaataatctagaaattcatttcaacacactaacatggatatcaccaccatttgagtgacttttgaggtcgtggaagttgatggcactgcccatggagagtaggcaaggaggcagaaaggaaagaacccagaccccccccccgccccacccccagagaacactggcatttgcaggacgaataaacagccttctgcttaacaagggtagcacagcacaggccagctagacagaggttcatgatcgctctgtaaggatgcttggataattcaatcttgttttcactttataaaagtgaaatagctttgggctgttgtgaaattctctgtctgaaattttaggttaggacccaaacaataacctgatgtgaatttagtagcactgcacttgtcctccttaaacaactttatctaaaagatgcctataaatattttgtataaaacttccggaattggctgataaggggactttcctttttcttctgcgtcaagttcagaaaaagctaaaagcaaaaaaggaagcaaccaaatatgggcagtatgcagtaactaatgaagtgagtgatgtggcttggaatatacaatgtgctcaaatgttttaccgctgggttcaacccagttagtatatagaagtttgtagagttcagccgggtgtggtggctcacacctgtaatcccagcattttgggaggccaaggtgggctatcacctgaggtcaggagttagagaccagcctgaccaacatggagaaaccccatctctactaaaaattcaaaattagccaagcatggtggcgcatgtctgtaattcccagctacttgggaggctgaggcagcagaatcatttgaacctgggaggcggaggttgcgatgagtcaagatcgcaccattgcgctccagcctgggcgacaagacggaaactcttgtctcaagaaataaaactgtagagttcatggggtcatttgtatagaaggaaattttattgaaatcactagttttttttcttttatgtatgtgaaaatactatttctgaagttctcttctcttcgtcacctaaatatggcaattttttcctacaatctgtcaacgactatgccaagaagcaaacaatgtgagttctaccacataagagaaacttcctttatacattctccacaaaagatttcaatgttatttcgtataccatcttcagacagtaatttatttgttttactatttttgctgttgttgcttcaggcctgatcattttccccatttcctaataggaaccaatttcctgttaattgctattaaatttgtttgctcatcctttgtcatatatatatatatatatatatatatataaaatttaaatgattttaaaaaataatatatggtcaaaaatccttgtattgaaaggattgaaaatcccctaggtgaaggtttgtattaatactttttgtttaaatcaccttcttttttatctatttctgagctatagaactcttgaagaaataatttcactgttcttaagaaaaactcagagatgtggtttggtcataaccctattcacacttggcttgaggcccattggtggattaatgctctccttaagaagcatgattatctgaggcttggtataggttttcaggcaccttagctcttttcctgttagatgtcagtatcatggctgcatcctccttccccagtgcatgaccactccttgaccttcacggtggtcagtctccagcagcacttacctcctgcctatttgttccttctagaaattcttgctgttttttgcttctgaagcataattccttcctagctcccttgactgtgactttgccactatttcattgcttcattctcctccatggcccattccttaaatgtaattggtctgaaggttttttttcctcagatacttttttaaattttttaacactttttaaactttaaaaacaaatttggccgggcgcggtggttcacgcctgtaatcccagcactttggaaggccaacgcaggcagatcacgaggttaggagatcgagaccatcctggctgacatggtgaaaccctgtctctaataaaaatacaaaaaattagccaggcgtggtggcacgtgcctgtaatcccagctgctcaggaggctgaggtaggagaatcacttgaacctgggaggtggaggttgcagtgagccgagatcgctccactgccctccagcctgggtgacggcgcgagactctgtctcaaaaaaaagaaaagaaaaaaaattttaccgtctctctgggttacattatatataccaaggtttcaattccagctgaaaactaacagcttccaaatatatatctttagcacaacactttatagttgctaacaactcagtttcctttgaaagtgcagacagatctttttcatcttttgtatctctttaaatacctaacagaacgcctggtacacaaatattagatagaagaaaaatgtacatcagttaaaagttcttaatttctatatcaattttagaattgtgttctaatgaaatatattgtactagaagatgtactggaagcatgaacgtagatatttccttccctgatacgtatttgtacttctgtcttcatgaccagcagaccagcctcacaattagtccatttgtaactaaagtctctatcagacagaagtgcatactggggttttagatgacattttacacaataattgttttcttcatttttctgggacagactgattttgagcataagtctgtgtagtagaaatacgaaaatatttgggaattcttttttctttagtgggagccttttattgctagaaatgaatatcccatagagctaaagaaagacctatgaaatttagcttttaaaaacaaagctgtgtttaagttctttggaaacagaaggtattgcttaaaaatgacacagcagatgttatgaaatttgttttaaagcattactctcaggttaagtcatgtttgccaagttacaacccagaacacgtttttacaactcagcagtgctctgaaattgagggtctgtgatgataaaagggtactcatgttgtgcagtggaccacgagtgctctgtcaagctgtgggtgaggaaatgaacctcacatcaccttagaagagtcgagcatctcttcctgagttgactgagtgaagccaaagtaaagttgaaaatgcaagctacattgtcccctaagatttacttttgttttaatagatgctgtgtgttgctctcactcagttttggagttatctgtgggttttcttcaatgtgtatttgatgtttctttagggcaaagttacgccactcgaaaacgatcgtgttgaaagtgtgtcatattcagaatgggatagaaatcaggttgcttgttagacctgagccttttgttttgttttgttttgtttgagacacagtctcgctctgtcgcccaggctggagtgcaatggtgcgatctcggctcactgcaacctccccctcccaggttcaagcaattctcccacctcagcctcccaaacagctgggattacaggcacccaccatcatgcccgcctgatttttgtatttttggtagagacggggtttcaccaggttggccaggctggtctcgaactccctgacctcaggtgatctgcctaccttggcctcccaaagtgctgcgattacaggtgcgagccactgtgcccggccagatctgagccatttgatccctgccttcatccctattaactgataatttatctattcattagggggctctgtgaggtgggttctgactgatgttggaggggatgcgctataattcctgcctctgcatttaagtgtatgagtgtttcaccagggatgtccaaactgtcccactttgggtaaaggacaaaaagcaggccaaacaagattttcttttgtctgacacaatttaaaaaaatattgcaaggtaaaatatttaacagaatgattgtactgggttggtagtgtgtgcgtgtgtgtggtttgcttgattttgaggcttcataatcttttaaaaagatggagatgtatgaccttcaaagcctttttctttttttttttttggagatggagtctggctctgttgcccaggctggagtgcaggggcgcgatcttggctcactgcaagctccacctcccattctcctgcctcagcctcccgagtaactgggactacaggcgcccgccaccacacctggctaatcttttgtacttttttagtagaggtgaggtttcactgtgttagccaggatggtcttgatctcctgacctcatgatccacccgcctcagcctccaaagtgctgggattacaggcgtgagccactgcgcctggcacctttttctcatttttattagtaggtagtgtcagcttgggttcttactgtgcacagcctatcttggcacagggtggcatctctttagttatgagacattcaatttggctttatgggtggaatttacttgatgcctatgaaaaataagttaaaaggcaatggaaacaacaaatggaaacatttctctctctctctgtctctctgtctctctctctctctctctctctctccttccacctgtgttatgcagatgtactgggaatgaaaaataagtcaaaaggcaatggaaacaacaaatggaaacacctctctctctctctctctctccctcctcctctccttcccctttcttccacctgtgtcatgcaggtgtactgggacacagcatacagtgcgatgctctcctttgtgcctgggagatgctccctccatccccctcctctgccatagcctatttgatgacgtctgtgactgtatggggccacagtttgggtctcaactttgtgtgaagcacagacttttttttagtctgtttttttttttcgcatcaaaatgaggaccaaatatttgatgactcctgatagaaaatattcttcaaagaatacccagggctgaaaacattaaaagttagcacaaagtgttaagtggttggtaatattagtattagataggctcaggtttgggactgtttctatcaaacataggacatatcaatcaaatgttgttgtagcgtaagtccagagaagatttttttttcttttagaaaattttcttttttttattattattatacttttaagttttagggtacatgtgcacaacgtgcaggtttgttacatatgtatacatgtgccatattggtgtgctgcacccattaactcgtcatttagcattaggtatatctcctaatgctatccctcccccctccccccaccccacaacagtccccggagtgtgatgttccccttcctgtgtccatgtgttctcattgttcaattcccacctatgagtgagaacatgcggtgtttggttttttgtccttgtggtagtttgctgagaatgatggtttccagcttcatccatgtccctacaaaggacatgaactcatcattttttatggctgcatagtattccatggtgtatatgtgccacattttcttaatccagtctatcattgtgggacatttgggttggttccaagtctttgctattgtgaatagtgccacaataaacatacgtgtgcatgtgtctttatagcagcatgatttataatcctttgggtatatacccagtaatgggattgctgggtcaaatggtatttctagttctagatccctgaggaatcgccacaccaacttccacaatggttgaactagtttacagtcccgccaacagtgtaaaagtgttcctatttctccacatcctctccagcacctgttgtttcctgacttttgaatgatcaccattctaactggtgtgagatggtatctcattgtggttttgatttgcatttctctgatggccagtgatgatgagcattttttcatgtgttttttggctgcataaatgtcttcttttgagaagtgtctgttcatatcctttgcccactttttgatggggttgtttgttcttttcttgtaaatttgtttgagttcattgtagattctggatgagtatgttgcaaaaagtttctcccattctgtaggatgcctgttcactctgatggtggtttcttttgctgtgcagaagctctttagtttaattagatcccatttgtcaactttggcttttgttaccattgcttttggtgttttagacatgaagtccttgcccatgcctatgtcccgaatggtattgcctaggttttcttctagggtttttatggttttaggtctaacatgtaagtctttaatccatcttgaattaatttttgtataaggtgtaaggaagggatccagtttcagctttctacatatggctagccagttttcccagcaccatttattaaatagggaatcctttccccatttcttctttttgtcaggtttatcaaagatcagatagttgtagatatgcagcattatttctgagggctctgttctgttccattgatctatatttctgttttggtaccagtaccattgctgttttggttactgtagccttgtagtatagtttgaagtcaggtagcatgatgcctccagctttgttcttttggcttaggattgacttggcaatatgggctcttttttggttccatatgaactttaaagtagttttttccaattctgtgaagaaagtcattggtagcttgatggggatggcattgaatctataaattaccttgggcagtgcggccattttcatgatattgattcttcctacccatgagcatggaatgttctccatttctttgtatcctcttttatttccttgagcagtggtttgtagttctccttgaagaggtccttcacatcccttgtaagttggattcctaggtattttattctcttcgaagcaattgtgaatgggagttcactcatgatttggctctctgtttgtctgttattggtgtataagaatgcttgtgatttttgcacattgattttgtatcctgagactttgctgaagttgcttatcagcttaaggagattttgggctgagacaatggggttttctagatatacaatcatgtcatctgcaaacagggagaatttgacttcctcttttcctaattgaatgccctttattcccttctcctgcctgattgccctggccagaacttccaacactatgttgaataggagtggtgagagagggcatccctgtcttgtgccatttttcaaaaagaatgcttccagtttttgtccattcagtatgatattggctgtgggtttgtcatagatagctcttattattttgagatatgtcccatcaatacctaatttattgagagtttttagcatgaaggttgttgaattttgtcaaaggccttttctgcatctattgagataatcatgtggtttttgtctttggttctgtttatatgctggattatgttattgattttcgtatgttgaaccagccttgcatcccaggaatgaagcccacttgatcatggtggataagctttttgatgtgttgctggattcggtttgccagtattttattgaggatttttgcatcaatgttcatcaaggatattggtctaaaattctctttttttgttgtgtctctgcccggctttggtatcaggatgatgctggcctcataaaatgagttagggaggattccctctttttctattgattggaatagtttcagaaggaatggtaccagctcctccttgtacctctggtagaattcggctgtgaatccatctggtcctggactttttttggttggtaagctattaattattgcctcaatttcagagcctgttattggtctattcagagattcaacttattcctggtttagtcttgggagagggtatgtatcgaggaatttatccatttcttctagattttctagtttatttgcatagaggtgtttatagtattctctgatggtagtttgtatttctgtgagatcggtggtgatatcccctttgtcattttttattgcatccatttgattcttctctctcttctttattagtcttgctagcggtctatcaattttgttgatcttttcaaaaaaccagctcctggattcattgattttttgaagggttttttgtgtctctatttccttcagttctgctctgatcttagttatttcttgccttatgctagcttttgaatgtgttttccttgcttctctagttcttttaattgtaatgttagggtgtcaattttagatctttcctgctttctcttgtgggcatttagtgctataaatttccctctacacactactttgaatgtgtcccagagattctggtatgctctgtctttgttctcattggtttcaaagaacatctttatttctgccttcatttcgttatgtacccagtagtcattcaggagcaggttgttcagtttccatgtagttgagcggttttcagtgagtttcttaatcctgagttccagtttgattgcactgtggtctgagagacagtttgttataatttctgttcttttacatttgctgaggagtgctttacttccaactatgtggtcaattttggaataagtgtaatgtggtgctgagaataacgtatattctgttgatttggggtggagagttctgtagatgtctattaggtctgcttggtgcagagctgagttcaattcctggatatgcttgttaaccttctgtctcgttgatctgtctaatgttgacagtggggtgttaaagtctcccattattattgtgtgggagtctaagtctctttgtagttctctaaggacttgctttatgaatctgggtgctcctgtattgggtgcatatatatttaggatagttagttcttcttgttgaattgatccctttaccattatgtaatggccttctttgtctcttttgatctttgttggtttaaagtctgttttatcagagactaggattgcaacccctgcctttttttgttttccatttgcttggtagatctttctccatccctttattttgagcctatgtgtgtctctgcacgtgagatgggtttcctgaatacagcacactgatgggtcttgactctttatccaatttgccagtctgtgccttttaattggagcatttagcccatttacgtttaaggttagtattgttatgtgtgaatttgatcctgtcattatgatgttagctggttattttgctcgttagttgatgcagtttcttcctagccttgatggtctttacagtttggcatgtttttgcagtggctggtactggttgttcctttctatgtttagtgcttccttcaggagctcttttagggcaggcctggtgtgacaaaatctctcagcatttgcttgtctgtaaagtattttatttctccttcacttacgaagcttagtttggctggatatgaaattctgggttgaaaattcttttctttaagaatgttgaatattggcccccactctcttctggcttgtagagtttctgccgagacatcagctgttagtctgatgggcttccctttgtgggcaacccgacctttctctctggctgcccttaacattttttccttcatttcaactttggtgaatgtgacaattatgtgtcttgaagttgctcttctcaaggagtatctttgtggcgttctctgtatttcctgaatttgaatgttggcctgccttgctggatttggggaagttctcctggataatatcctgcagagtgttttccaacttagttccattctccccgtcactttcaggtccaccaattagacatagatttggtcttttcacatagtcccatatttcttggaggctttgttcgtttctttttattcttttttctctaaacttctcttcacgcttcatttcattcatttcatcttccatcgctgataccctttcctccagttgattgcatcggttactgaggcttgtgcattcatcgcgtagttcttgtgccgtggttttcagctccatcagctccttcaaggacttctctgcattgattattttagttatccattcgtctaattttttttcaaagtttttaacttctttgccattggttcaaacttcctcctttagctcggagaagtttgatcttctgaagccttcctctctcaactcgtcaaagtcattctctgtccagttttgttctgttgctggtgaggagctgcattcctttggaggtgctctgatttttagagtttccagtttttctgctctgttttttccccatcttttggttttatctacctttggtctttgatgatggtgacctacagatgggattttggtgtggatgtcctttctatttgttagttttccttctaacagtcaggaccctcagctgcaggtctgttggaatttactggaggtccactccagaccctgtttgcctacgtatcagcagcggtggctgcagaacagcggatactggtgaactgctaatgctgctgtctgattgttcttctggaagttttgtctcagaggagtacccagccgtgtgaggtgtcagtccgcccctactggggggtgcctccaagttaggctactcgggggtcagggacccacttgaggaggcggtctgcctgttctcagatctcaagctgcgtgctcggagaaccactcctctcttcaaagctgtcagacagggacatttaagtctgcagaggttattgctgtcttttgtttgtctgtgccctgcccccagaggtggagcctacagaggcaggcaggcctccttgagctgtggtgggctccacccagttccagcttcccagctggccaccttgtttacctactcaagcctgagcaatggtgggcgcccctccaccagcctcgctgccgccttgcagtttgatctcagactactgtactagcaatgaacgaggctccgtgggcatagaaccctccgagctaggtgccggatataatctcctggtgtgccatttgtgaagcccgttggaaaagcgcagtattagggtgggagtgacccgattttccaggtgctgtttgtcacccctttctttgactaggaaagggaattccctgaccccttgcgcttcccgggtgaggttatgccttgccctgcttcagctcacgcatggtgccctgcacccactgtcttgcacccactgtccggcactcccctgtgagatgaacccagtacctcagttggaaatgcagaaatcacccgtcttctgtgtcgctcactctgggaactgtagactggagctgttcctattcggccatgttggctccaccccaagtccagagaagcttattgctggcgagcgtggaaacatgcatgcatgggtttctgtctgagtgctggagctctgtagagcaagggcagcttgggatggcctgccagtatgccctggcaattctgtgttacaggtgctgtcctttctgctccttgtggtgtgacatgccacaactcatttaaccccctgcctgggtatgtctgacaaattgagaatatagaacctgatttatctagagttttgccagataatgcatacgggtgtctggtatactctcctgaaaatatactatggttatacagagaattacaatagcaagtgactgggtacttcctgcagatggcagggataatagaggcctcccagtgaggccactatctcgactgagattgagatctgagtgaggagcagagccggtggtgtccgcaccaggggaggcaaagctgagcggaggacacagagcatggtgtgttctgaggacagggccacagtcagacaggcaggaaggaaggggttggtgcaggggagggtgcatgaagaagagcagaggggtgcacggtagccagaccacggaggtctttgtaaaggacagagcaagaaacttgattttcctgcagatgggatggagagtctttggagagctttaataggaaaatgacatgctctgatgtctatttccaaagctcaccctgcctctctatggggaaaaaataggtggtacaggggaaagagtggaggcagggagtccagctgggtgatggggacttggagttgggagtcaggtggacatgaggcacacagctgtgttcgaggatgctgggacctgcccagggactggagtagaagctgtcaactgaagaataaccaggatcagacatttggaagagctttatttctcataaagggttatagcctgcaggctggccattcctcctgctgggaggcagagctgagagggagggaggataagacaggaatttatgctgaaatttctgggtggctggaaatacatatttaatgagctataggaggagtcatgaatatttatgagaggagaaacatgtacaggcacaattgagttccatgcctcttcatggattacatgttcaaaaaatggcagtgttagcatgatctgaggtggagttttcagccctctgacatgaaaaggtgcagtggaggacaccagaacctcactgcatcctctgagagtcagccaaaacgtgtcccaaggtggtcgtcagtgtttacgaagggatgtgttgtgagacaggtgagctgtcacgtggaagaagtgaagagggaggggcatctggtcgcagtttcagatgattggctaaggtgataaaggaatgagttgtccatttctcattttccagagctgatttctgcttactccttagaaagagttttggctaaaggttaataaggaaggggcacactgaggcgtgttcaaccttatgtctgatgtggtcaaaaactccgtttttaaggtttctccaaggtctccttggccaagagggggtctgttcagttgcttgggggcttaagattttatttttatttctcaaagacctgggagagagaagtgtccaaggcacctgctagagttttacctaagcaaaggggtgggaaggtattagcgctgttgactaagatggaaaacacgggagaagaggggcttgtggagaaaccacacctccattctagccacgtccactgcgaatgcaggtgacacatggaagcagcaggaacacccctgagcatcttcatggagtttggatcaagatggaagaaaagcccatgcgttgtctaaggctgcctcatctcagaagccaatgggcggtgtaattagtgctgaaaggtgggctgggggatgactgcattgctctagcaaggaaggaggagcagggagctgaagggagacaggtggaggaggccaagcaactggctaagcccatgagggctaagggaggcctaaaatgcgggacattggagaggaaatgttctggaagcttctacaggcaaactgcattgtactggaaggggccgatgaatagtgctgggtcaagggtttttaagtggaattgagaataagggaagcagaaaggtggtttgaagaggcgaaaaaaggaaaatggactgaaccgaaagggccttgggagtgttatgggattggagaacttttcctaaataatttaggagctccagtagaatttatgtttatgtgaaagaaaaaaaaaaaaccacatgttacttagaattgggaagttttgtgcacccatgtctaggaattaaattttatatgaattcatatattatatattatatatacataatttaaattgtgatttttaagaagaaatcaaatcaaccagcaagggcaaaataaaaattttaattatctatttgtttttccattatttttatacacaaatcttagaagcaggaacagagtagtttcaaaggccagtttctgagacatgcttaaaattggcgctgataacaaagaaactactatgaatggctgaggtttcaaagttagattagagttcactctagatcgtatttgctaagctagtaaagccgtgtaggcttgttctagcctgttggctgggaaactatctctaaacaggatgtggtgattatttgtgaatgatcattactcattctgacaacagatcctcactgcatgcccaaggggacatccccttttaaacatgcgtataaagatgactcaagtacgaatatcatatgtacagcgtatcaatattagctgacctaccaaatctgaaaatgcttaagtaaagataatacacaataatctagttatattaagctatattcgggatccattaagtagcctcatagttatagaaaaggataacaaaaaaattttttggcaatctagtggaataggggtatggggtttaaaaaggacaatgaaaaagttcactgagcaggaaaggaatggaagattgctcaacagatctacaggaaaccattcccccgccatcacctctgcatttcaaaaagcaaatgcaattccggtcagaagacattgtctacttcggagtgatatgcttataatctatctgtgtgtgttttttaactcttacagtgaagcttcaattatatcttcttaaccccttcccaaagccttgggaaacactggacatttttctatataagcagattgggttatttgtccaaatgacgggtgtttttgaactaggacatctagcttctatccataggaaaccccatatctggtgggcaaagaatagagtataaatattatgtatctgatatttacactttgggccataagtgtttgaaacagttatatctattcatgtgaaatttctgttcacattatagcaacaacatcaatttaaaaaaaaaaaaacaaaaaagaattccccaagactgtccattctgcgtgtgtgtatgcacgtgtgtgtgcatgtgcaggcattttgcaccatgctgcaaaacagctcctcttcctacatttgcccttgactgttcatctcccaagactcaggtcttcattctcctctgcacgttcctgtgctttcaacccgtcttatagtgaccccaattctatgtgttcagcccagacctcttcttgaaccacaggcccacgctggttgagtgaatttccagttttcagtacgacatttcctcttaaatgtctgtggtctttcggtccctgaaaatcaactgtcaaactattaactgactttatacatcctcagcatgcacacacacacacacacacacacacacacacacgtaaatgcacatggcaggggttggggcacaaagtagataaaaactcctgtctcgaatcacttgaacctgggaggcggaggttgcagtgagccaagaccatgccgttgcactctagcctgggcaagaagaacgaaactccgtctcaaaaacaaaacaaaacgaaacaaaacaaaaaaaattccggtctcctgccatagctcctgtcttggtttcaggttactcatactaggaacgcagagacttattcttgacttttctctctcccacagtctccatacgcaaacagcccccagatatggctgctttaaccctgccgttgcatttgaatctttcctttccttcctgctgcccctccaccacagaccctgctaggtctgactgccatggctctcttctttcccttcacctcaatctcacatgtcacttcccactaaccccacctggtctcccatcctccatcctgtcccctctaagtctgttcttcattggaatgatcctttcagaacctgaatcactcatgtcattcattcctctgttcagaaacttgccgtggcttctggcctcattaagagagtaagtctaagtccttgcaatgatccagaccactgttgattatccctgccactgctgtccttgctcattgctctctgccacggtggtctcgttattcaacgtccctgggtagattttgtctttaggttctgaacttgctgttccctttgccctcagccctctcgaggggtcactcagatcctcagcactgccctcctcagtggaccgacatcgacaccttaccctgtttccaagtcacttttcacctctggacacactgtgggatttacttatttctttggcttgttttcccacacacattcacacaatgtataagctctatgaggctgcagtttttgtctgttctgcagttgatttctcagcttctaacaggaagtaaataagtagtttttaagtaaatgaatgtgaatcttctggggagcatttaaaaaaaaactgttgtacaaactctgcagattgaggatcccttatccacaatacttggaatcactggtgtttcggattttgattttttcagatttttgaatatttgcattggacttaccagttgatcatccctggtctgaaaacctgagatccaaagtgctctagcaagcgtttcctctgagcgtcatagcacactcaaaaagttctgggttttgaagcatttcagatttcacatttttggattcgtgatgctcaacctataccttggacctgtcaaatcagaaaccttggggagtctgatccaagagatgatactttttcaaggttccccggtaatccactgcccagctcaggctgagcgccattgctgccagacagatttcctaaaccgtggacatcatcccaccttcatgcccttcgacattctccgtttcctcatagaatcatgcccagactcaaagtgacagtcacaaacccgcacccgttgccccaggggccttttggcctcgtgtcctgcccctcaccatgcgcctcttcctgcctgccggaagcgctgttgtcttcccttgggtgtgttgctgcctcgtgccctcccttgcctttgcctgtgctgttgctctgctgaaaatactttctttccattctctgatgggtgagttgctcaaggataaagtttggattcaaatgtcagtgttatagttttccctaatgctctctctttttcctcacatctccccccggtaattaatggttgcttatataacacattgtgtgtcatatccatatcctacaccattggagttcctcattctctcatcagactctgagcacctgaaggataagaacatttcattgatttatcctcaacattcagcgaataatcacatatagttcttttaccctcagtgtctgccaaattgtcaaatatggttgtttagtgtgccaaaacaaaagttatgttattgatgtgaggtatctctttatcaagtttttccgagtattcagtagtcagatacctgcatgcgcatggctgtaagcatgtgtacgccccacccccgccaccgccccgaggagaagagtgtgtgcccagcctgggcccttggtcctgaagggagagcacgtcacccattgtcatgttattatccattaacgtgacattgtatcttctctctacccagagacatcacccatcttctcctcattcctgaagacctaactttagcctctactactctctctttccgcagataaccttcttaggtactttacttacttaaaaaaaaaatttttaagggatgctttctaagtgacatctcttatacactcatttctaaaacgataagtttttctcttcctctccgaatttagtttcctattatcctgatctatcacttcttaacggacactgattctgctctaagcctctttcacttatttttatatgctctctctctctctctctctcttacttccctgttggtctttcagttttctggtttctcctagcattaaataaaaacaagagcagtagccgtcctgcctggtatcccgtgctatccctgtgctccctcctccacagtttcgccaacagcggttggtgcgtgttgagtttctgttcacacctccggcccctctccatgccctctgcaggccgctgccatctgggtttctctggaagtgcagaggccacaggttgcaatctacactccagcctcggtgcctgtctctgccctggttctcctctgccagctgacctcttgccttctgattcccagaaggacagggcgttggttcctgtgattttccactctcctggggccccttcctgcctctagagtggccatgcccatctcagcccttcctcgccctgagggctatcaaaccataaatgagagaacttgccagaaagcctgaggccacggaaacattccacacactgtgttttccttcccaagtcttggttatttcctctttgttctttgtctgtactcctcaagcaaacctctttcttgaaatattacacttctcccaactctctctgcagttttttttctagcaccagtctatatttgcctgcatgatgaggccttaccttaaactttacatgtctaaaacacatcttttgtcttcctcatcctttttaaaataagtccttccagatttctatctttttgtcattcatcttctgactctagtgccccaagtctctgatcatctctgtattcctccccctttatttgcccttcatggccagccagtctttgcatcctttcactaccctccccgccccccgcccaatcctagcataaactttcatatcctgtattacttcctgtcttcaatctcttcttttgtattacagctacaaacttgacctttctgaaagcctgttttcattgtgtcactctgctcagaatctgcagtgatgcccttatttctcttccaggattaggtaactctacccagtcttcaagggtttccacagcatgccccaccttagcaattcccagcaccccgaggcctgagcagcggtggggtctcctgtctcctctcctctctgccttttgatgaatgctcttgttcttcctgtatgaaacgctcccccgccttctctctccccctcttgccgtatatctcctttctttctcttcttgttcttctgtgagtacatctgtcacaggcccttggttttctgtcactgcttctacttaactattgagatgacagaatgagagccttcagatgggaaatcctggtttccaatgttgcttaaagtcttaccactttattaagcaagcctaaagctcagtggcagagtccctgagtaagccatgtcttcgtctctttctccctggtgatcaactctgtacttggagcatggatccttaataagtatgttttgttaatgaacagtcaaacagatagaaaagactcacgaaactgtttattgtattccaacaaatgatagctttgaaaagaagctaacctggtggctcacgcctgtaatcccagcactttgggaggctgaagcgggcggatcacttgaggtcaggagtttgagaccagcctggtcaacatggtgaaaccccgtctctaccaaaaatgcaaaaaactagccggcgtggtagtgcacacctgtagtcccagctactccggaggctgaggcaggagaatcacttgaacctgggaggcagaggctgcggtgagtaaccactgtgctacccgtgtggagatcgcgccactgcactccagcctgggcgacagagcgagactccatgtggagatcacgccactgcactccagcttgggcaacaaagcaagactccatgtggagatcacgccagtgcactccagcctggcaggagagcgagactccatctcaaaaataaataaaaaaataaaataaaaggagctaagttaaagttgaatgctcagttggataatcgtttactaacaattgataggagcttggcctctggtgagtttctagatgacagtggtcttagacctgtctctatcccttgctgttttcattcatacagtaaagaggtttattgactgagccactcaacaaccatttcgtaatatctatgatggggatacgttgatctttaagggtcctttcaactgtaaaacagcgttgatgacattttctgaagacaaacaaacactcaaaagccttacttcttaacaggcctgttgaagattttctttttcccatctttgccatcacaggctttctttacactccctccactccactccacccctgctttttcttgtcctaactctatgtctacaccaaggctaggcccttgtgcttttagctgccaaacaccgtatactcttaaataaaaacagtagaatttgagtaaaaagagattttcttagagttctgtgatggaccaagcatgaaatgatacagccaactctacgaggaaataggaaataggaccttgaaggttcttttcagagttaaactgtcctgttggattgcttgttcattttaagactttgacttattttagatatttttttcagataaaagttcggtgatgacaaatgaactctacagtctggcatctaccctagcagactatcaaaattgaaatgattaatataacattcgtcatttgagataaataccttagaaatctcatttaaagatagtcatgtaacgccccatggttttctaccgaggcgtgctttctttgctcctatgtctgtagggcagttttctaatgcagtggtgtcagtagttaccgtaagtcagcagtcattgtgtgcagctctagtccgagcactttaggtctgtggtaacagtgacttaggtgtgttgaacatagtttcacccttcaagttgtcttgtccagctgggattacagaggaaatgagaatttcctaattagtcagttagactgatcttggatactttcatctttgcaacgtcttgtcttacaagaaagtaatgaagccgagattgttcttcctatttagaatagaccagggtgtccacaaggcctcaggtccttccgaggtgtcttgtaacagcattccacaacagctgttctgttttaaggctcagtgcactccacaaattccagacgccccatggctgctacagttgctgaatggtgacttcaggcttcacttggttcaagcctcaagggggctgagccaaagctggcatgacttgctcttcagcaacaagttccaaatagagaaaacatttcaaataccaactgactgctgctttcttcaaaagaaactgccttcagaggagaagctcttccctgtgctcatgatcctggttccatgacttccacagcattttcatttcccagcccttctgtggtggggacagtcgatctagtgattgtgaataattttagtgtgcaatgcttaacttttacaaaacaagccaacaaagctgaaaatattatttggatgataagaggagcaaacaaccttaaggaatatttttaaagtgtggatttaaattgaatcgtaatattaaatttttaggtttggtaccatgtaccttgaacttcaaggattgttatttaccagtaatatctacatattaaatctttatttaaacctgatatcaggaggaggagggtggggagagaatggtcaatgggtacagaattccaattagaaaggaacagtaaatgctggtgttctattgcaaagtagagtgacatactagtcccccaaaatgatcttagtacctgctactctagtcaacaaggtattatatatctcaaaatacctagaggaaaggattttgtacgttcccacctcaaataaatgataaaatatttgcagtgatgaatgtgctcattagacttatttgataactacacaatgtaaatatgtaccaaaacatcacatcgtaccccataaatatgtataattatgtttcaattaaaaataactttttaaaaagctgatatattttagctgagtgtgaaagctctgcaaatacagtagagttgttgattaatttttcgtattattatgcattttaggttggtgcaaaagtcaaccgcaattacttttataccaacctaaaatacgtaatacaatatttacttccttgaaaaggaaatccttaatgcacatttaaattatgagttcccagaataatgtggctggtaaaataatacattttaaccatttttaagtgtacaattcaatggcattaagaacattcataatgttttgcaaccatcaccaccatccatttccagaaccttttcatcttcccaaacagatcccgttacacagtaattccccacaggaattcccgccgccctcccccaactcagccggttatatccactgttctacttcctgtctctgtgaatttacctattctaggaaccccatacaggtgcaatcatacaatattttcctttgtgtctggctcatttcactgactgtgttttctaggttcattatgttgtagcaggtgtgcaatttccattcctttttcaagctgaataatgctccgtcttgtattggcctattttgcctgtcccgtcatctgctgcgggatggtggtagtgttcgcgcctgtggcttttgtgaagaataccgcagtgaaaagggatgcacaagtttctgttttggcattgattaattttgaaatgtgcctcactctttttcctataataggtaatactttttgacaagaaatattaaatatttttccaaaagtggtgcagaattggcatttttgctgttttcataatggaataatacttgaatgggtataggcccttattggaagttctgggttctaggttggctggttacagatttgtgtaagtcctcatgcctcactgtaaataccatcttcacgcagtagcgagccctttcacggcacctgtaaatgattaagtcaatgtaaagagaagactcattatccctctttagataaggccaggagatttgtgagagaggtttttgcaagttctgtgcagaactgcagtatggtcaaagctgagctgttaccttatcagctgtgtgtgagccctgcaggtgttatgtggacagcagtagagagaagtcaacagattggattttttttcttaatttctgtattggaaaaacatgggacaacgggtgtctcctatatttaatttgtgcttagatgtctactagaacctgatgaaagtgtttttgttttccagttaggaaaacacgctgtttcgctcacaaggttgaatgaagatggtggtctttgcgcaatatccatgtattaatacattaataacaattgagcttataataaagaattgtgccctttcaaattatctgaactgtctgctgtatgtcacattttacctttttagagaagtgctaattcatgttaagtccgcctgagagatttgtttaatgagcagattaaatggatgattatccctctcaattttttttttttttttttaaggaagggcttcttgtgatgctcctctgttatttggcgcaggaacacagaggggtctttttaaaattacccctgcagggtcaccaggacccaagctgtttgcttcattaaaccctggtggcttctttagagccagcccctccaaacagccctgacacaattgtatctaaattagcatctgactgacccctttctctcctcttttcaagcccctgctgacagggattggcaaaagatgttaattggttgggcctggcttggaacaatagacttgccaagatgacaaaagaactaatgtttctttcaatatgcatccagattcacataagtacctcttttaattcctgggaattattgtaatgcctggtcaatgggataattgaccctcagcagctagctcttactccataatacagcatggcacaggcctatcagagtagcaggtactagggtgatttgcaggggactaaaaagagattttctcagccagcgttctgtgatgtaccaaggcagcccagtgggagtcccagagaggggactaatttgagcttaacagggggaaaatgtgctaagagccactaaaacttatcctcagaatcataaaggagttgcataaaggaatgagttaggagtttgaaagaagtgagttagtagcttggcagcttcgaactcatatggtgaaggataggacctgggcccaacaactctagacaggtggagacgccgcagaatgttgacttccacacaggaaaacacaaggtttatttccagcacataccttcgctgctcgttttatagaagaggcatttccagttcagatgttaggctaaatgagcccccaaaccttttcttatctcactctttactatcccaacttgctagaaatcttacagatcgttttgcctggtactgaggctctagaatttgttttaaaaaattaactgtggagaaaagggaacccttgtacactgtagtttggaatgtgaattaatacaaccattatggaaaactatatggaggttccttaaaaagaataactagaattgtcatatgatccaacaatcccacttctgggcatttacccaaagatttcaaatcagtatgtcaaaaagatgtttacactcccaaattaattgcaacactattcacaatagcagagttatggaatcaacctaagtgtcaatcaatggatgaatggataaagaaaatgtgagacacacacacacacacacacacacacacacacacacacagtggaatagtcttcagccttaaaaaagagatttagtcatttgcaaaaatatggttggaattggaaaacattatgctaagtgaaataagccaagtacagaaagacaggtgctgcatgttgtcacttacatgtgaaatctaaaacaatcaaactgaaagatgcagggagtagaatggaggttatcagaggctggggatgggggatggagagatgatggtcagagggtacagagcctcagtgagacaggaggaatatgtttttttctttgagatatattatacagagtagtgaatatagtaaataataatgtatcatacacttaaaaatcactaaaagtaaatttcaaaagttctctccacaaaaagatgcgtatttgatgtgagggatatattaatttgcttgatttaattattccacattgtattcgtgaatcatggcatcactttgcaccccataaatacatgtaacttgaatctgtgaatttacaacctaaattttttttaattaactgtgtaagtatggtatagtatgcactacagagtagtcttactttgaggtttgggttgtaattccaatcaaggttaatgtttaaaactagctgtctccgacctccattacggtaacaattggcactacatggtgctgagtgggagcttcattttgtggttatgacagcccaatctgagaaggaggtgtttgtggaagcactaaatgcagcagtgcgttggtcaactgagtagcctttgaggtcagatagccctgcgtctccctcccaacttgtcacctgtgtgactttagcaagttactatcatccctacgtgtaggttcctgctttcaaaaagggataaagagttaaaaatagcaattttctaaagaatcgcagagcaaagtgagctgatctcatgttattccatacagtgccagatatagagtagtactggataggccatctgttgtcatcattgccccaggatcgcatagccaggaaggaatagagatgcaattcacactgactgctgtttgactctgaagcctacactgtttcaggatgctgcgttggcagttcattcctaaaatttaagggaaaatatccaaacacctcaaaaatggtgaaaaaatagaaatgcttgtttccatcttttaaaagagcaagtgagaaaaaaatatatccattaaatataacaaaattcagatacatcattctgaccttctttgccagaaaattattttcctttcataaaactataatatacttttttctagtgcatgtctgccatggaaggagaccatttaagcaagatattgattgttagttctcaagtttattagtttctcacaaagaaaaaggtctgatttatacaccagagcgtggggtgcatgccactgcctgaagctggtgtagagcatcctttaggcttcaagggtctcaatcagaaatcatgttgtgtttgttcagatgcttgatctggcgaataagttcagtctttagaaattaagttatcttaggttaatgtgaatcaaatttaaaaaatggtgaaaagcagcattttttgaagtgatttgagttaggaaattagtatagtgtacaaagtctttctgagcttctctgggagcagctctggtttttatcccagaaagtgtatcctttagcaggagggcttctagctgaccatggaagtcaaagttctagtccagcttcattactaagcagctctgagcccttgggtggttttgtccatcactccaggatgtttgttccctgagcagtaaaatgaagggacacaaccaggtgacctcatatgactcctcagcattagaccaaaagacactctcgtcatcatctcacttgatgtttgtgccattagatacttatggctacctctgcttcctgaaactcttctttgtggacatccaaattatttcttgcctagttccctcttatccatctctttccatctcatttgccagttcttccttccctggcttccatttaagtgtgtttttccttagagttcagcccttcctggatttcctgtgttttcctatggtatcacttccattcccatgacaatctgcaatgtgtatgtgtgtattaaatattaatataaatatcaagtataaatatccagcccttacctctttcttaagtgccagacttggcttttctaggaacctctcccactttacacctgtgtgtttacttggccacctaaacatcaacatacttgaaaataaaatctattttctacaacctgtgtactgatgagcacccttatccatctcaatgctcagaagtggaatgtggaaggtttttttatgctcttactattccctaacctacacatccatctgtttccatccctcctctccttcaccagtatgtcttcaaatccacattctcaatgctgatgtactggtgtggccctgtcatcttctgctcaactacagcagttactccaaaccataatccccttcccgccatgctttaccttatggtacacccctgtcactgcacagacaattgttaagggtcacagctacctacagagcaaaccccagtctccttagaggggcttcgcagtgctcccccatggggcttctgtctgcccgcctcagccaccctttctttaactccacctcttgactccaagcctggaaccaagccatggctttcacatgccgtgcatccctctgtggaacgcccttcttcccccttcccgatttgttaggatttggctcacctttcaagcaccaaactctcatcatttgttaaggtttcgccatgaaaggtgttactgcctgtgtggaatcttctccaaacttcctagcagaattcatctctttctgtgccgacccacagctcttaagcatttctgttctaaagtgcttctgttctaaaattatgttgcactctaccagtgcattggtccatttatcataatgttgaaacaaaaacatgaaacatttctgtgaaattcttctttatagaaatcatagaatttgtgtaattatgtacttaaacccacgctagtggagcatctgtcatactgtgttaccatcaacgggttgtgtatcagtcagggtctaactggggacagagaagccaggctaattatttaaaagattgtcatttaattaaaggaattcattgcagatgtcatagaggggactgagagagaacctgggggtgaacaacagcagaaaatcgccaccaccctgtgatgaaaggaccaagacaagaagcaataaatataccaaagctcagtagctgggtcgctgggctcattagctcaggagctggagccctagtgggccagtccagcaggggcgggagcaataagtgaatcatggccaattttggaaacctccaggcacagggggagaagtcctggcttctcccttcttctctaacctcttgccagcgcttcccactgggaggacccagttggaaggtgctagaaaatgcagcctgcatgagttggcccctgcaggggtgaggcagaactgactccagtcctagagacccagcacagacccaggctgtatctgtctccctcatgtgttttcttaaacacaagaacctcatcttacttgcttttgcaactgcagtgcctagcaccaagtaaggtttaataagtatttagtgaattgcaatgaactctaaggtttccttccaagactaaaattatgttgttctctaccagtgcgttggtccatttatcataatgttgaaacaaaaacatgaaacatttaccaagaaatttttctttttttctatcgtagagtttgtgtaattatttacttaaacccatgcgttagtgcagtctcaatcctattcctttattaacatgaagccagtgctatttatcagctcttggttggttttgaaaacattttccaccaactgtgcgtcagattaaatacaggaagggaaatggagacattgatttaataaacactaacaatgtgacagaaagggaaaaaattatgttgcagaccattttcacataactcatcctaaatatgcctttgaacaggctcctgctggtctgtggccaggccctctgcgccactcagcacaaaccttctgcagtacagcccacaaggccgtgggcacagcacaccgggtctgagccagagaactgtgtcgacggtaccagccttcctttttaaattgtcttgcattcccttggtggggacattccaaagaagacagacagtccccgcagcaggtgcatgtggtgctggtgttcagctgcgtgcattttcacaggttgctgtcttgcaggcgagtcaacctttagcctcacccttctgtcaccagcccgctgcagaatcttgtcgattgcactgatcagacataaagttatcgcgtcggctgtgccatgggatccaatgtttgatgtacgtggtccagcgaggttggaggaaatcttagaaaacaccccaagttctttgtttccaaatgaggaaatcgaagcccagaaaagggtcactttttgtagcttttggcctgtaactcatgtcactcctaacccatcatcatttttgttttgctgcacaagctctggaagttgttttaaaccttaactctgaacagagtgttacactgtggttgtatttgtaaattagtttgcttctcttctttctgcctcctcttatctctatttatgtttttctatatacctcttcttattaccttgagacttgaactcaaaaatcacatgttgggcacttgctgagtcctagataatatccagggtccatataacttggggtttttttctggcaccaacatccttatcatcagtccaattgctctcacttcaaagtccttaaatcttgcacttattttcacttcttagtgcgttaacagattgtacacaactcagaaggattgactctagccgcccatgcctggtagtaacctctcttcatgtcagtagaattttagagtctttgtctttgaagtcatcctccaacccaggccagggcagggatctctcctgtcctagatatcttcatggatacagttagcaaagttgacaccaaatgttaagcataatgagattagcctggttttcttccttcccttgtcttcccttcccttccttctttttgtccccccatttaaagactttctaaatctgcagagaaccagttttaacttactccgcagctgaaattaccagatgcaaagtcaaggcaaatatgatacagtagtagttgttttgcattgattatatctgctcctcatagtaaccctgaaggggtttttatagtctgcatcttatgaagaaattgagaaagacagagaagaggtaatctacccagtgtcacagagatgttaagctgcaaagctaggctatagtcttgggcctcatggatttcacacctgcccattacactgtgtcactcactctactgcattaggaagtacagcatcagctggtggctataacaattacaattcatacaaataagtgtaatttcaagaccaatcactcattaatgttgacataaataatttactagaaaattctattttggtgaagttttaaaatagcatggctttcactgtgctaataaatatttaaagaaagatgtatttgttttttcccagcaagtataaaaataatttcttcaaaattcgatgtattattttaaattagttaatagatgtatcacagccatggactgcagaagttgtaaaaccttatttaattctaaaatttcttaaatatcagagaatacatttttgttctttgaatattggaagccccaaaagatagttgaccatgaagaagaagatgagggaaatatgagaaggcagatgtttgaagagaataattatctgtagagggacatgtttttagattcaatgaattcatcacttgtaaagtggaaatcctggccaaaccacataaatggatttgagctgactgccagataaggagcatttcagaaataaaagggcaatggtgcagcttgaaggataggcttccaaaagcattctgataaaaataaaatgcctcaagatgctcaaggttcctgggtgatagataggagcttttcctgggaagagcatcagttattaaaataggaaggagggaaatttgtaacaagaaatgaagaggccaaagtgtgatagttgttgattgggctgcatatgctttcaactatgtgatagtccagttacaaggttacttgttgatggtggctccgttgttgcccaaagagccagatccatgattaaacaagaaaaaagccaacgtggtatattaacatccaacagtgaaaaaccaatgtctgttacccaggacaccaaagggaacccttcagtccaaaggggctcttaatttggaagggaataagcagcagtttatgttataatatattataattgcttattttaaagataatttgtcctagtttgtgaaagcctcccccccgcaacaataaattttctatgaattgcacaagtcaacacatagaaaatttggatgcagtgaaaccaaggataagatgatttggtgtttgattggcacttgtctcccatccctcccagcagccgatcctggttatttcatttcattttggaccccacttgtaacatgatgttagaggactgctgtattggttactgtgattattttaaataacttattgtgtattcctcataaaaattattaaagggtgcaaattgcaccctgggggttggtgttcaaatgggagctaaacagcaagaaaaggtagtttaaaatactattcctcataggcagagatacaacacatgtgatccccaaaagtagatatgagcaactgtgttgcatgaaaaccatagataatgaattctcttttttaaacctgaactaagtaatacctggaaagtaagtgaaattcacatgtaaaggaatgtatatttttccagatatgaagctacccatcctttaatatgttcttttccaaaagtatacattgtcctttttactcaaaatgttcaggtaagcccacagttaagactcagacctgagggaagacaacatcagttcatctggggaaaatatagacaaggcctccgctaaagcatccagcatatggcagatgatgtcagccagggatagccacttacaacatttagaattggtgtgattcttatctgagcgtaccctctcctttataactgtattcagatctccacatctgagagactggagggatttgggttttgcatttttggtttcgggatgtgaaagaatgtatatctttctgctgaggagggctgtctgagctctgagtttgtagaaggtgctgcgaggtgggctgcgggagcctcaggattctctacccctcctccagctcctgccctaagagactacagtgtcactttaagggaagtttaccctccctcaacccacttccctacttccaggtcagcccttacctgtcagagcccatcactgcccctcatactctgaaactagtctcacctgagtcggcagctggcttttaattccaattccaaagattttctgtatctttcttatagacctctctgtacttttgtcagttttgggagattttcttgagacagagtcttgctctgttgctcaggctggagtgcggtggtgctgtcatagctcactataacctcgatcatagctcccataaccttgaactcccacgctcaggcagtgcccccacctcagcctcccaagtagctgggaccacagacatgtactacaaggcctggctaatttttcaactgtttatacaaacaggggtctcgctatgtcgtccaggctggtctcgaacttctgggctcaagcaatcctcccacctcagcctcccaaagtgccaggactacaggtgtgaaccactgcgaccagcgttgttttgtcttgaactcacttcctttggttcttaaaaacccttcttcagattctttttgtgttccagctagcccaactccttctcggccttttccctcttctgtaacttacaggtttgggttctacacctcagcattgagcccgtagatactggctcattcttcctgaatggtccttgtactcttctggcttccattcatacctgcacgtgtatgacctccaaatctaaatctctgaaaagttaggtcacccttcctggtgctggactcagtgacccagtgccctccagatgtatcaatctacacacattattaacacacacacacacatcctaagctcggcacttgtgaaaaagatgtctttgtgttcccctgcccacttcctcctctgcctgtgtttctgccttagtaaatggctccaccatccaccagctcacagagccaaaagccgaagtcctccctcttaccagactcatcagtcaccaggcctggtaatttgccaagtctccttgcaggctaccctgcccagcctcacaagaacctcacggtctctggccaggatgcccatggaggcccatcctgcagcttctggtgctctgaggctcccatgcccttcctctgcctttgacagactccttttcctaaatactgtcaacatttctttattttgcttttacttatttatgatctgagaaaaactgttcgcatccagagggcaggctgggcctgcctgtaaccccagcacttgggaggccgaggtgggtgaatcgcttgagcccaggagttcgagaccagcctggtgaaaacctgtctctactaaaaatacaaaaaaattagccaggtgtggtggtgctcgcctatagttctggctactcgggaggctgaggtgggagaatctcctgagcctgggaggtcgaggctgcagtgagccaagatcatgccactgcactccagcttgggcaacagggtgagattctgtctcaaaacataaaccacaaaacaaaacaaaagcagagggcagaaactgtatcttccttccttgtagcctgagaagccatacagtcctcttttcctcactcccactgcgttgtaaaagcaatgactcaggaatgagatcttagcaaaatttaacagtgaggctaaaagacttttcctacaaaacagtatgctaatattagagtacatatcatggactctttttcctcaaattatctgaaaaattatcagacatcagaaaaactgagttgaggccaggcgcggtggctcacacctgtaatcccagcaatttgggaggctgaggcgggtggatcacgaggtcagaagttcaagaccagcctggccaggttggtgaaaccctgtctctgctaaaaatacaaaaaaaaaaaaatagccaggtgtggtggcgggcacctgtagtcctagatacttgggaggctgaggcaggaaaattgcttgaacctgggaggcggaggttgcagtgagccaagattgcaccattgcactccagcctggcaacagagctagactctgtctcaaaaaaaaaaaaaaaagaaaaaaactgagttgaagttcatattttgttctacgtgtaatttatttacttgtgaaatcttgtactgtcatgaaagacttaggtctaaagctgaatatgctattttgattgattaggtgatatgttgtagaaccgtataatatttatggtttgaagtatagtttatggtatttatttgatcgaatgtgtattaaagtgaaaagtatattgaaatattaatatagttctaaaccagattaagtaaataacgtattgaggtagtgaatctttttccttctatagtttatttgttagatttttgtaaaaccattgttagattttgtaaaaccatttgttagattttgtaaaaccattggcacttttgtgaagtttgggaaataagaattaactacatttttggggttttagaatagagcaggaaaattctggtgttaatgattgcctataacctcaatatagaagaataaggacgtggaattgtaccacatcatcaataaaagttctccttaccctaaaattctgcaggtgggtccatcatcctaatcagtaacacgcaatttcaaaaaatctctgtggtcagtttattatgcttgttaagagtttttcttctaaagtaacatacagaatttggatgatctgagtgagtctgagcagggccccaggtggatttataggtgtttagaataaaaggatgcttttacataaatcagtacaattagttttattattgcaaccttgttttaggcatttatgttagctggtgacaagacgatgaaatcttcagatcctgatgtttcagtgaaccacaaatagaaggaagttgacaactatcacactatggaattgcaacaatttgcagagatgacagaaagggacatctgtttccagtcagtgggcagggagttggtttcccgtaggcagctgcctgcaccttctgtagaaggccaccaagtgctcagaggttatacactcgcattcccggagctcttcggagagcacaaggcaggagggtcagtgacgttctcgcattctttttctggctggccattagaattagtaggccacatctaatacgtccacacaggtccagatatcctacacaggggtgtgggttcccaaagaaggggggatcggtaggccctacacatttgttgctcatctgtttgcatctcaggcaactgtgagctggctgggcttcctgactgtgacagacacaaattctaatccttgtagcctcattcctgcaattgtacccagacccttgcctgctaggaagcccaggagatgccttctcttacagggaaccagtcttggaccctgcgccatgttgatccagaactgatgtggactcttttccgttgattttcaatgtgaagggaaagggacaagtggggttaaatagaaccagacctggccaccctgtttactttagaaagcaaaggaacaacctagaaacacatgtcttagtaggaacacaaattaagaaatagtggccctcctcacaccagaaaaggattgcaattatcatatttagcctaacaataccagtcaagtttccccttcccagatccaccagtgtagccctgccaagagcagcagcaatttacttgccagttcatgaagtctttctaaaattgtattttattaaagtcttttatttcactttcagcgaacatttattatttgcctcctacaagccagcacaccgcaagacatttgggacagaaagggtaagctgcagtccacagctgtagagggccaggctaagtgctaagagcctgaaacgcacaagttgtgaaatccttatctgctttttcctaccacctttttcaacttaagaaaaatgacgctattaatattgatgtccagcaggccaacatttctttttgtaaattgtcaagactgaagttaacagtgaacaagtccagatcccatcctgccatgtagatccagtgtagcctggggataattcaacccttagcctccattttttttttttctgtaaaataggcatgatcataagtccctctgtcccctagaagacatcaaaataataaaaaaaaatggacatgaaagatgtccattattctcataaaagatgctacctagatccagcgtaggaatattttatgatggctttgatcttcatctttctgtagacatggggtttaacaatttaaattctttctggctttgtttttctaagattgccacataggtagattatgtaatcctagcatcttctgtgtggttgttctctggctgcataagacattgcaggaaaatgatagtatagttacagtgtctggtttgttaaatgatggactttcatcattatcaaaggataattcttttccaaatagctgagatggatggggaaaccagtactagccaggaagctacccttcagcctgcttcccccatctgcaaaagaactgaatggatggatgatgtcctacagcacagtccctcctccttccacgttgtctgctgtgcctctcccactcagaacagagtcactaaaggcttaacaagaacaattaatgcagtggtcacagacctgacctcctgtagatatctggattcatttcctagggctgctggtagaaaatgccacagaccgggctgctttaaccatagaaatgattgccttgcatttctggaggctggaagtcaaagatcaaggtgttgacagggttggttccctctcagagcagtgagagaaaatctgttccaggtctctcctaacttctgtttttttggcaatcttctgcattccttggcttatagaagcatcaccctgatttttctttcctcttcacgtgcgggccttcctgtgtctgtgtctgtgtccaaatttgccctttttataaggacatgagtcatactggattagggctcaccctatttacctcatttcaacctaattgtatctgcaatgaccctatttccaaataaggtcatattcagagatactaagggctagggcttcaacatttgattggggggggaatacttaatgtataatgatatttttttcattgaggtatgatatggtttggctgtgtccccacccaaatctcaccttgaattgtagttcccataatccccatgtgtcatgggaggacccggtgggaggtaattgaatcatgggggtaggtttttcccatgctgttctcataatagtgaataagtctcacaatatctgatggttttaaaaagggtagctcccctgcacacactctcttgcctgctgccacgtaagacatgcctttgctcctcctttgccttctgccatgattgtgaggctcctcagccatgcgtaactgtgagtccgttaaacctctttttctttatagattaaccagtctcagatacgtctttattagcagcatgagaacagactaatgctaggtgttctgggttccttctgtataaaattctcagtaataactaaccagataaaagactgaattgcctttttcttttttttaataagtgatgtggtacttttattccctgaaaaaaatcctctctcagctgggtttgtgaagtcacagtgactttcaggtgcttactgtttttattcagactaaaaaaattattaggtgggggctggggccctgtggctcaacgcctgtaatcccagcactttgggaggccaaggcaggcagaccacaaggtcaggagatcgagaccatcctggctaacatggtgaaaccccatctctactaaaaatacaaaaaagtagccgggtgtggtggcaggcgcctgtagtcccagctactcgggaggctgaggcaggagaatggcgtgagctctggaaggcagagcttgcagtgagttgagatcgcgccacttacactccagcctgggcgacagagtgagtctctgtctcaaaaaaaaaaaaaacaaaattgtagatgggtctccttcttgacaggcattgaactagttgctgagaatgtaatgaaatgcttggccattgtcctcaagcaactagtaaagggaacaaacatgtaaaatatgtttcatgtaatgattgaaatatatacacagaacaaaaaaattaacttggctaaagttgtcaatctttttttttttttttgagacggagtttgctcttgttgcccaggcaggagtgcaatggcatgatctcggctcactgcaacctccacctctcaggttcaagcaattctcctgtctcagcctcccaagtagctgggactacaggcgcgccaccatgcctgcctaatttttgtatttttagtagagacgaggtttctccatattggccaggctggtcttaaactcctgacctcaggtgattcacctgcctcggcctcccaaagtgccaggattacaggcatgagccaccgcacccagtcagttctcaattttcatagtaaatttccataattaaattgtcttaaatgtggatctgagtgtatttttatgctgtttaaacccttcaataagcttcagcttgacattatgaaatagtccatgattcctaacaagacttaaagactctccacaatctaacttgtttccatggcaactttcccttgtactctgtgctccaccatggtagctcctggaatgttcctggccctctccagcatctggggccttgcctatacctagagcagggtcgtctatttttcccattccatggcccctcccctgtcaccacatcaactcctacacatctttcaggcatccaggatctttcctgatcactctccactcctcccctacctaccatcaactcccagagcactgactgtaacttttatgccatttatcattcatttaatatatttgttttccaatacatggacggggactctggggagcaggaactgggtctcccttatagtccatggtatctgctgcatggaatactgtgtctggcatgtaataggtgttcaatggctgttttgctaaatgaatgaatgaaacatgcaacagatcatggggatttggggatcatgtccccaaaataagcttaaaatttgaaaataaaaatagatgatttattaccagtcacaaaaaacttaaattttaaattatcgtaggctaggcatagtgattcacgcctgtaatctcagcactttgggaggccaaggctggaggatcatgtgaggccaggagtttgagaccagcctgggcaatatagcaagagcccatctctacagaaattctacaatttttaaaaattttaaattattgcagagctcttggaaatgtttgaaagcatgaacaaatagattgaaaatgacttggtagtgacttctattggtgcccagagagccctgggagggccacaggcagataagcaaggcactttccctgcatcctgctgtgcctcccgctccttctccttgccactctctcctgtgtgattgttttgtgtttgatttgcctcctacccagtcttcattcatttaccttcttccctttcctgtagctcacatgcatggtttgtcctgatacgagcacacaaacactagctggatattgccctccgtgctgcacggcgggtccctgtgccccggagccccactcctcctcggctgctccacacactggaaactgcatctgacagaaagattaaacgtctgcattttatcacctttgttgaacaaaagtccatggcttcttcatttcaggagtgagttcagtgtttggtttttttctttgaaaataaatcaggtttgacttttgggggcccccaaatgattcccaatctcaaaataggctggtagctgcctgtgtcagaattctgagcttttctgggtcataatgccagttagcatttctcaaaccatggcgctgcttttgggccagcagagtccgaaaagaaataataggatgtatgttgtagttagatgagttcatgctgagaaatacgtgtctccacacgcagagatttaaaaggcctgaatattcatacggtcttatcaaagccactcactggttattagttcttcatagcaagtgaaagatatgtaaatcctcagaggttcatggtatatccaggctgaataaatctgaaccttaaaaaagaattggcacattgaatttttcatagatgttcatccatctctgctgttcactcatataacaaggtgtttctttctcaggctgctgtcctgcctagagtatggcaaaagcccagatgaaattgcgattgctttgtctccaaactgtatttgatttagctttatgttgataccatttatcttcttttgcttcaaacattttacattgccgaagatggctttgaaagcagaacacccacatttggtatcactgcattcatttctcttatgttttggcttcaattcagtgcttttaatattcatgaaggttgaaaaaataaacatcctagactatttcctctgaatggaaatgttatggtttcaaaccctagagaaaacaactggtaagttctacaaacccacatcttctccccgtcagttggaaagtggccccagcttggcagaagtcacagcccccttgacactctggggctttccagagcagatggccagggggcctgtgttagggaagaggagagagtcagcagacatgaatatttaaagactccctttggaatcatagatactagaaccttttcagttgattcagaattatattatttctgtcacgaagaatatagaggaatcatttattccgttgacttctctgtgttcaaatgaacatcattgaaattttttcttagtcctctctccttcatttacattgagcctgtattgattttcatcctctctaaaattagctcagccagtcccttctatatagagaagaattcctatggaatatcagagcagggaatagagagcaagaactccacgcaaattcgaaagccaacctttaaagagaaagaaaatgattactctaaataattaaaagaaaactgatactcagaagtggtgtttcaataatagaacagttgtaggattcctgtgccgtggtaactccgtggattacccatcttgttgactttccgtcactattgtccaagatgacattcccagactcaccagctctcttcttccctcccttgcattcagagggtggtcccatgcctcaggctgatggctgcactgtttcataaatggcagtgaaagttctcccttattcttccacagtacaaggtgagcctccctaatgtgaaaatacgaaatctgaagtgcccccaaatcggaaacgttctgagacctgacaggatgccacgggtgaacagttcgacccctgagctcatgtgctgagtcgcagtcaaaacacagatgcctctctttttcaaaacttctctgtatcatctatcttctctgtcttttttgggaatccctgcaatttttctatgtgcttaaggctaacaacctcttcccgaggttatgttctgcatctctgtggctgactcacaagccgctaacaacctctttcattcctaccacttcccactgaggatgctgaagagacaaatatgggcatccccagcctccatcgtaaatgtgcgtgaccatgtgagccagagtgggctggagagcaccagggaagtcaccggacgtccagcacgcaggcagagctggtgggggctgccttctctcccttccctgaaggcagatgggatgcccgttgccatagtgaccatcctggaacggtgaggctgcaagcaagaggaaaggtggcccacatgagggtggcggtgctaaagcactgaaagtcctgggcacctgagagcaccaagaaggcagatatatccttcagaattacattgggtcacaaatcaaccactgtttgtttgagccactgtttgccgaatttttagttacatacaaacacaacctgatactcccctccatgctacccctgaacaaaatgaagattttcaaaaaaccttgccagcggccgggctcagtggctcatgccagtaatcccagtgctttgggaggccgagatgggaggatcccttgagcccaggagtttgagaccagcctggcaacacagtgtgacctcgtctctacaaaaaataaaaaattagatgtggtggcgctgcacctcgacaatggctggagcccatgagtttgaggttgcagtgagctgtgatcatgccagtgcactcaaacctgggcaacagagcgagaccctgtctctaaaaaaaacccaaaatccaaaccttgcctaatcctgtgactacttgtacatttttaattcccctatccccatgggcttttccctaatgtcactgaacttcccgaacgtgaactcccaaaatgctttaaatgactgtgctctgttgctccacggttctctccagcttgtaggtagggcagccccacgtgctcctgtgctgccccacgtgcctttgctccttgcacaacgtggggcttttctctcatgggtcatgagggtctttctagtctctgagacccataggtctttgcctgtctgccccttagcctgcctgcagcatttaatgctgttctcctctccctccacgctgacactctcccctcacttctgcactgcacctggaatgatcttttaacaatgtgaatcaaaccatgttccttctctctttcaaacgctttaatgatgtagaattatacttagaacccagatacctgctaacaagtcccagtctggcctggccctgtcctgttagcttccccgtaaagcactatctgcccacctccgcccccatcccccaccccgcccagttcctcctgtgcattaggccttgcactcagggcctttgtgtgggctattgcctctgtgtgcagctccccaaactctcttgccaatttctgcaccttctgggggactcagctcaaatactacctcgtgagggaatccctaagccctctctgcaatggcatcaaaatgctttctttcattgccatttatgacaagaatgttaattgtgttatttgtttcgtgttaacatgtttccccttccccagaatgtaagcatcttcagatgaggaaccttatgtggtttttttttcgtcattgtgtgcccagcaagtggctcagtgtctcacacataacatgggctcaaaagtattttttggttggataacaaatgaaggctcagtgccatctcactgtctgtcagatagaatctcagccacccagctgccatgcatgggccttagggtctggctgcagccgacctgtcacgcctcctccacatcccccacatgggaggaactactcagccttgccgccggtgttcctttcgtcctgctggtcctgcctctccagctccctcctgttgctattttaatatgaaaactgcacccactttgacaagaccagttcatgacacattttggatttgtccccaaccagaagtgacctctgcctcccttgttcttccacagtacagggtgagcctccctaatgtgaaaatccaaaatctgaagtgcccccagatcagaaactttctgagacctgacaggacgccacgggtggacaattccacacctgggctgatgtgctgagtcgcagccaaaacacagatgcatagaacacggttcatttaacgtccctaagggaaaaagaaaatcaccttcaggttatgtctgtgaggtatatatgaaatgtaaatgaatttcgtgtttagacctgggtcctatctccaggatacctcatgatgtatatgcaattattccaaaattcaagaaaatctgagctccaaaatacttctggccccaagcttttcaattaagggatattcaacctgtatattgctttatcttcattatggctcctgtcctatgctaagcagttcgaatgtaagatgccacagaagtgactgtgccccatgggctctggtgtcatcccccacccccctcgactgacgagtgcagaaccttgtttgacaggcatgctggataagcagtgggctgtgatggtgggtgctctgcccgtcgtgaggctgagagcactgaacagtctgcaatacctgaaccaaatggaagtaaattagaaggagcttgagctgggggaagaatcttgaagcccgtggccaacgttgaaaagagccttcatcagagtgtgaagtggcatccaagacagggaaaagccagggccaggtgcggtggctcacacctataatcccagcactttgggaggccgaggcgggcgtttcacctgaagtcaggagttcgagaccagcctggccaacatggagaaacccccgtctctactaaaaatacaaaaattagctgggtgtggtggcgggtgcctgtaatctcagctacttgggaggccgaggcaggagaatcacttgaaccagggaggtgtaggttgcagcaagccgagatcacgccattggactccagcctgggtgacaagagtgaaactccatctcaaaaaaaaaaaaaagaaagaaagaaaggggaaagctggagagttgaggtttggggacctgttatatacttacccacacagtgatggatgctccccgtacagtagaaaaaatgtagcacggaagcacgtcagcttagctggctgagcagatgttgtgctgaatgtggatctcagaggggaacagaaaggaaaaaggcctctggtgtggtcctcagaaaacagcacctacctccagtctcttgggattagccagagaagaaacgccagggagcattttgcttggggattccttggtgtctgttttttcgcagcttcccgcaagaaagaacccttttcatcacttgagtaaccattgccccctccccacaaaggaaaataaacaggaaaatttccctctggggtggctctcgagcatcagctgtagctgctgtagcaaaagatcaaacccaaatacttgcaccttgtggtcattggcatcaaaggctgcaggttttctttccacctaattttaatatgcttgtgagccttgggaggcttaattaaaactgcaggggagccaaagtaagcacacaaaggaactgttttgatgcttcaaaaacccaagcaaacagaatctggattattcaattaggtatgcttatgggatttgtcctgggtgttttgattgctcaaagcctgctggggaagtcagttatgaggtttagacctgaaaggaaccatagttaatgccccccaaatttcacttttcatcttcttagttaggcttcccgttaccagtgcattgttgtgagctgtgcatgaacttttctttttttttgagacggagtctcactctgtcacccaggctggggtgcagtggcgtgatctcggctcactgcaacctccgcctcccaggttcaagtgattctcccacctcagcctccccagtagctgggagtacaggtgcatgccaccacacctcgctaatttttgtatattttggtagggacagggctttgccatgttggccaggctggtctcaaactcctgatctcaggtgatccgtccaccttggcctcccaaagtaatccccaaagggattacaggcatgagccactgcacctgccctgtgtgtggatttttattccaacttctgtttcctcagctgcttcttctacagatgccagataacatggcagggtcagctcagtttcccatcttaattttctgcctcgcttggtggggatgttcttggattcccttcctattttccctgatggttttggctatgcaggatagcctggcagttctgagcacaggatctctaagctagaccgcttctgtctgcttggccccagacatatcacctaatctctttatgcctcttaataccatctgcaaaatgaaattcaagatcacagggtttcctctgttaattcagtttcttttttttctttttaaattcatgttaaagtgcttagcacaatgcctggctcaggatgagtgttgagtaaatgacagcagtgatcgtgattacactaggacgtaggtaggtgcctatcagtcaggtgtagccagtggttatgggaagactgggagggtgcacacctaggccttcccaagggcatgggggtagacccagcttcagtgctgcactcaagcccagtctaaggcagcctcaaaggccacgtgacagatactcacacaagctgaagttggtggagtgtctgtccacgggactggcttacccagagtacatttcaagtgacaaggactcttgcagtgagcttggctgcagctaatttgtcattacatcatgaaactctccctctgaaaatggaactcagagtccaattcacagaggaatttattgccaagatcacagccacagcaagacctggaggcaggcagctctgtctcttggggctgagtcagtctgggctgatggtgagtaccatgcaggaccctcctagaatgtatgcttgtagctaaccagctccaaataaactcatatgcaaaggcctaggaggaaaactacccaaaagaaaaggtttacctgatgctaacttaagaatccaaatgaaaatacttagtgtcagttgctaacagtttatgaagtggtgttacctgtgctgggccttaacttcttttccagatgtttctaccccaacaaagcagcctgtataggatttctagtatgtacgggtaggctgtgtagaaaacagcttccctttcattgtctctagtgaatccattaggtaagtgtctgcctgtgacagagcagccactgagaatacagggatgtagagaacgtgtacctcacactaggaggctgtcagtctagtgacgaagtgagtacacataggcatggcattgagctgatacagatcgcaaggcacagtggcaggaacacgctctgcagggtctgcagccttgattccaatggtggcttttacctccggtcagcagtgtgaccttaggaagattatttgacatttctgaacaaaccatcctcatctaccaaatgaaggataacgctcttgtggtaaggccaccatatgtattaaatgaagggaaggccagtgaccagcacagtgcctgacaaatggtcatcatacaacaaatggtggctctagaactgttaccatcatagaggaacacgggagggagcagaccattctacctggagaagctcaggcagtgttctttcagctgtgtcttgaaggaggaagaggaattctaaaggccagaacagtggtggaggggcactgccagctgagtgaagacgggaaaagacaaagaaaaaaaacaacgttgaggatttgaagaaattcatacagttcggtgtggctgaagtgcaggctgctggtgactaagggccaggagctgggtcctgaatgaaggggcaagaccaggagtggactcagataccattctggagagttcgatttgccaactttagcaagaatgtgccaaaaatcccagctactgttactaagtgctaaggatgctactaagctaagctatatatatatgtaaaacattggatgtccagcaaacaccctacaaagatgacactctgttttacaaatgagtaaactcaggcttatgngaaattaagttacttaatcattaaactcaccctattaaattatggtggatttgggcagctgcctccctgaaggacatgttgtctcagttgatatttcatgtaaattctgttgtcttgtttttcggattcataatcactcattgtttttctaccttggtacagcaagcaaataaactctccaccattgtcagacttgaatgagtttagtcaacttcccctgctgggcagttgattagatagaaggagaagtggctcactattatagtgtaattttctgatacaaagattcatttttacttggtgtcagtccatttgcattgctgtaaaggaatacctgaggctgggtagtttataaagaaaagaggtattttggctcacagttgtgcactctgaacaagaagcatggtaccagcatctgctcctggtgagggcctcagaaagcttccagtaatggttgaaggcaaagcgggagctggtatatcacatgcaagggagagaacaaggggtaggggaagcatcacactcctttaagcaacgagatctcctgcaaactccttaccatggagagggcaccaagccattagtgagggatctgcccccatggtccaaacacctcccatgagaccccaccttcaacgtgggggatcacatctcaacatgagatatggtggaggcaaacatccaaactatatcactccccaaatcaagcattatattaaaaactgcacactatattttaatttttcatgatagatattaggcttgagttgcaggtaatatgagacctttagtggaggttaagcctaaggatttcataaaattttgaatgtccccataaacaagattcaaactaactttagatgaatcatcctcagtcaaaagatgggaaagtaggtgttagcatcagccttagaaatggggtatgtcattcatcaagtacccagagtcctataatctgaattcctgctgtcactcccacccttcaaagtacccaactcacattgatttgggatgagttctaaacaggtgtttcctctgtgttgcaaatggtttgaactggagccttgcatacctctggcatgttcatccagacccagctgatgctcatgagcatgtatgctcatctgacggccagtccttgctgattcccacgttggtcagcactggacacagaacagatgttggggattatagggaaggattcgggaggccatgggcctgagtgtctgcggaagtcattcattgtggagacgcagacaggccctgcagagtcttcagtgagaagttcgattaaataagcctcaatgggcctgcgtatcaggacgcaaaacaaatgttttccaggtatcccttaattgaaagaaaaataataaatcatcatcttcaagtcaggctaaatgaggaagggaaataatcccaatcccacaagttttcatctgacttctaatctaggagttcattagtgggatcatggcacgtaagcatccgagtagaatcctctgattaattaattccatgaggaatcatcggaagacagtttgcagagcagagggaggctgactgcccccgtgggaaaactcttttaaggttgggcccaattttccccaatatgacacaggactctttcttcctggtctgttctggttgtcctggagtttctttgtcaagctgctccactgatggtattgtctacacctcagctacctgtccaagacactctcagaggtctgaggcgtggaactctgtgggctatgaaagggttttactttttgctgaaccacccacctacagccctccgcttattgaagcagcagaaagctcaccagaggtggcttcttgtttccttcagtgtttccaagttactctgtagacttagtgaacctaagctttgcactcctcatagctgtgtatgagtctttttctgcgataagcatagaaatgtttcatctcaggagaaagcaagttggtaataaggaaaacaaagcaactgacaatagttgattaatattttttaaagaagaggggataaaggacacatacaactgtatgtcattgacattaaatgccatacaaaaacgcaagtaaaactataagggaaaacaaaatgtacccttgtagtaaatattctgtgaaccaaaatctcaagtgcagtcatagaagtcattcactcaacttttgtggcattttattttttttgctttgtctttctattctttctttctttttttttttttttttgaacagcccaatgtaactccattggttgtgtttggaaaaatgaaagaaaaggctaattattgtcctttgcttttcttgctctgaaaacagcttccattctccacaattaatggagaaatataagaagacagttctatataagcaaaagaaatacctcggggcctttaacaattaaaagggacaaagacaggcgggagcggtggctcacacctgtaatcccagcactttgggaggctgaggctggcggatcacgaggtcaggaaatcaagaccatcctggttaacacggtgaaaccctgtctctactaaaaatacaaaaaattagccaggcatggtggcaggcgcctgtagtcctagctacttgggaggctgaggcaggagaatggcatgaacccgggaggcggagcttgtagtgagccgagatcgcgccactgcactccagcctgggggacagagcgagactccgtctcaaaaaaaaaaaaaaaaaaaaaagaccaaagacataggaaaggaggtctagatgatttttatgaagagtatatatcaaatattatttatatattaatccagctttaagatgggaaaatgctataaacgtaggaagttctccatagaagaatcagtcaaaagtattcctgtttgctcatgtctaagaattctgaaactagggaaactgtattgaaaagataaattgaaatatattggaacgggaaatgtagctaaagtgtttccattagggtacaatgagaaaaactggatctgttttatgtaaattttcaacagtgacctggttaaaaaaaaaaaaaaagttgaagtacattaattaaatttacagagccagaaaaggtgaagacccaggaggttaaacatagaaaatacagatggactgaaagagatgagaggaaacggacagacttttacagcatgatattcagcttggaaatatgcgggagaatacgacagggaataccagccaaaagtcagatagctagtttaaagaaaaagttaataaaacgttgaagtctgaaaaactgtacagaccaaagccaggaaattacaaagttatggatcccgcagtaactgtaaattaaccccattgcacatatgtagtatttcacattaccgtctgtggtgttaactttcatgcctaaacatgcatgtgtgtgtgtgtttcacctgaattatggttgtaaagggaacaaaggtgctaacaggacacggaatggatcgccagctcctttcatgggtctcccaggagcctctaggcccaagctgctcatccaccatggaatagagcaagcagggagacatgctttgattcaaagagtgttctccagaggggctaggaagagacacctgtttcttgacaattattaaggaagtcgtgagtgtcgtgggtagatggaaggatgtctgcaacacgttccagagacaatgcattggatttccatcatcccttctcctttcctttttttttttttgaaatgaagtctcactctatcccccaggctggagtgcaaaagcttgatcttggcttactgcaacctctgcctgcctggttcaagcgattctcttgcctcagcctccctagtagctgggattgcaggcacgcaccaccacgcccggctaattgttgtatttttagtagagatggggtttcgccatgttggccaagctggtcttgaactcctgacctcaggtgatccatccgccttggcctcccaaagtgctgggattataggcatgagccaccacgccaggccttctcctttcctttgattgcctcatgggaactactctctctttcaccagcgtgctccttttacccccattttttgcctccataccacagtttgtcctctacatacccctttgtcttggagggctcgttccaggtgctaagaggcagtgctttccttttagagcttccaatctatggatctggttatttgtttgcccgttttggttgatttttgtaaacattttttagtcaacttacatggtgtgctttccaacacatctctcacttcaggcacaggaccaggacggaggagtccgcagcctccctgaatcattgctcaggcctctcttctggttcatgtgtctgcttctagcgtcttccaccttttctcatcacagcaatgcggtggtttgccactcttcttcctgactttcgccatattggggatgttttgtgccaatgtggagactcctctgttaccatgtcttcatactcttttgacttccctggctcctgggagggccatgtccacaattcattcccatcccttggcagggctggccctccacaacctggaatctgtgtcatcctcaagatcttagcatccgattccccgactcacagccatccctggttcggctgcctcctgccaccatccccactgaaactgctctgaacttttcactgccattgccaacctctctgcctttgcagtttgacgtccactcttaccagttctcccaggctttcgcctttcttctttccagtggggctccaaaaccacttgtgtaggtgggacatttcttcttgtccttaactcccctgcccttcttggttctgggtttctgccctgtcgtccccaccatctgcttgactccgtgcactcaggctgctccacgtttggcgaaacgtgaaaggatgtggatcctgccctcagtcctcgggagcgtgaagggctgtggctcctgccctcagtcctcgagtggcactggcagttgggctctcctttgctgacttcccgtgcctgtcacagcagcttccaggggctggactcctctgctcttcatgccgaacttgactccgccttctgctcaccacagagagtgaggccccttcccggtggctcttcagcgtcctcctcgccaccctggaagcctcttcccagagtcctctgctgatgctgatgcctcccatctccgagttaagacctggccttggccttcagagctgccgctttcaactccattcctgaagctgttcctctcctcaccccagggcctccctgcaccactttccctcttgaggttttacatttcaagaccttctccctcctgcccgcttcctgctgccttcccgtcctctgggcaggccccaccggcctttcctccacactgactcatgcatattaccgcccccggttcccctccctcactgtcctcccagaatttccttcaccttcacagcacaggtcccactgacgaggacttcatggagggctggctgttcttcttcctccacctcctagcatagctgtcacccaggttctggtcacaagcctttgcccaccgtgtgctcctttcctctgtgatcacatgcatctccatgggttcacccctcagcaggtgcaggcggccctccccacagaggactagcctggcctctgagagaggctgagagcttgggctctagggccttgttggatgctggctctgccacgatcctggccaagctccgtgacccatcgtgcctgagtgacctcacctgtgagaggagaatcaacagcaacgtgggttgtcaggagggtgagctgagctgattcacagagagggctgggcacgtgccatggtgtgcggtagcagtagtccacgtggctctttcctcactgtcacagccgcccttctccggccacatgggatccatctttgtggagcactccacacccacaattcctcagcctctctccagatcgagaactttctgactcctccaggaagggagatccacggagcctcagagccgctagttccacctcccccgagtactgctcctgcttccctgggggacacttccccctcccatctggctcttgcttgacttgtcccctccactacttcaggggcctcctcctatgcctcccagatcctgtctgcccttcagttgctctcatagctgctgccttggtgactgttccctgtttgaaacgatcccatggctttctgttgtgtcctgaaggaaatctgagctcctcagttcagcagccctctttcctcacaggcttccctcccctccatgcatggcctaaacccaagcacactgttctcctgcaggaagcacctctgtaggaggcagcgtgtctggccgtcttctggctgcaatgctcttcttacctgcgctgaaatggatcctcaatgaaccccacacaggcgtctcttccagaacccgtgtgactctgctctgccctagaagtatctcctcacccgtcccatcctgaccaattgctgcttgaggacaaccactgtccctcttgttccccatatagtcctggcagcagcacacactgaatccaactgtggtgacttcatgcctgtgtccattctttaaaccagcatctcaggcctcacaccaagcaccagggcagagagtggaatgtatcaaaattgtggcaaattttgcaccaagagacaaaagtccaggaattaaataagtggcctattcaaatattaacatgccatttgcttcatatctttttgaaaataaataaaatgctgaccacattatatgagtctccttcgttgtcctcccagtctcactccccttgagatagaaatgctctcgttactttactgttgactgttttcatgcatgtattctgcgtgcataaacctatagaaaatattaacaatacacagtgctaatcatgcagggttttgaaactttaaatagattgtattatatgtactcttcctcaacactgggtttaaaaaaaaacaactgtttttgaagtttatcatagtgatataattgtagcacattccttttaatgctgttttccattatataaatttgccaaattttttttattctcccattgataaacatttgagtttcctttttttccctacagttgccagaaatgccatagtgaacactcctgaacatatctatttgtggacatgaatgaatttcccaagagggcataatctggaatgaaatgcacattgcaaatttctcagtctgtggcttttctctaactttttttatggtgtcttttagtacaaaagttttccattgttaatgtaggcaagcttatcgattttctttttttttgagatgaagtctcgctcttgtaccctaggctggagtgcagtggcatgatcttggctcactgccacatctgcctcccgggctcaagcgattctcctgcctcaacctctcgagtagctgggattacaggtgcgtaccaccacacccagctaattttttgtgttttaagtacagatggggtttcaccatgttggccaggctggtctcaaatccctgtcctcgggtgatccacgcacctcggcctcccgaagtgctgggattacaggcgtgagccaccgtgcccagccaacttatcgattttctttcatggtttctgctgtttgtatgttctctaaaaactaatcaaggtcataaagatgttctcctatgttttcttctaaaaatgttgaatgcttttcactgtgagctctgtgctctacctggaagtaacatctgcctgtggtacaaagtaggtcctgatgttttccatttggacgagtagtattgcctttttgccagaactccctcccctgtccatggacagggcatttgctagatttcaagcattgtccagtgaggtttttcatgtccccgctgagagtcttgggcattgcacagaagggaggggtctgagctggagcccttgtgctgctctgtgtgctccattagaggaacgagagcatgcgcctccagggtttgaacctagggagcatctgagatggtccagagtgggccatctggagaggcatcctctctccagagattctcagaacaataataatacctccaggatagttcagccgttgcaagcttgaaatccctggagaactgctatgctgtcaactggaggcttcctctcctcactcaaattacttcccttttataaaaatgattctagtcatgcacgatgtaacaacgtttcagtcaacagcagaccacacatatgaccaggatggtcccctaagatgataatgccatatttgtactgtaccttttatatgttcagatgcatagatacttagcattgtgttacagttgcctacaaaattcagtacaggaacatgctgtacagcttgtagtctacaagcaatgggctataaaagatagcctaggtgtctagtgtgcaatcccatctaggtttgtgtcagtacactccaggatgctcccacaacaacgcactcacctaactatgcatttcccaaaatgtgtctctattgttaagcaatatgcatctgtattttgtaacctgtcgatctctgcctgtatgatttgaaaacgaatgttattttcgcttcatagatcccaactttaatgggacttgtactactaaggaatagtgaggaaccgtgaaatccaatcaaacctggctgcctgtgtagactcccagccttctattcatggataagctgcatgttgcttattaactgagcaccaagatgtagcagctttgctttattgcgtaatgatgcatgactgcttgctcagttagcacaactgctgtgtgctggaggaatagagaaatcctgtggaaacagtccagttattacgtttattgttttaaactgttacattttaagcaaaatagaaaaagacaagggtcagaaatatagtaaaataattaatttatgtatggtaaagtcagactaggattactgggctaaaaattgaagctggactatacaaatttaaaggcttgcagttgattaaaatgaaagttatttaaatgctagcaaatcatgatatagaaaatattagtaaatgatgaagtattcagtaaagccattgtctgttaggcatataggcctgtaagagctgggcgggtggctcacgcccataatcccagcactttgggaggctgaggtgggcggatcacctgaggtcaggagtttgagaccagccaggccaacatggtgaaaccccgtctctactaaaaatacaaaacatagccagatgtggtggcatatgcctgtaatcccagctacttgggaagccgaggcaggagaatcacttgaagccgggaggcagaagttgcagtgagccgagactgcaccactgcactccagcctgggcaacattcgtctcaaaaaaaaagaaaagaatacaggcctgtagaaggattgcttaagcccaggagttctgtagtgtgtcataccagtagggaatctgcactaatttggcatcaatatggtgacctcctgggagcaggggaccaccaggttgcctaaggagtgatgaacaagcccaggtcagaaacaggtcaggtcaaaactactgtgctgatcagtagtggactcacaacggtgaatagccactgccctccagcctgggcagcataatgtgagtgtatttatcgctaataaaaaaattatttaaaaaatatgtatctctgacaccatgggacaggcactgactcttgaattggagagacctggattcaaatcctgaggtagtctcttactgtatgaccttggactgtccattcaactcctgaactttatttcctttatctgtaaaatgggaataattagtatctcccctacaagggtttttgaaataatgtatataggcatacccaggaaagaagggtttgatagaagagaggggagcctgaaaccaagacctgcctctcacttatgcctgaggccagtgtgtcattgatgaaaacaggaaatactagggacggggtgggaggaagtgagggttggttttaggcaaaacatatacatatttatgatttgggataaccttgttggaagtcggaatgattgcagggtgtgctggtgaatctgcctgtgcccccagcagtgtgtatgtatgtgtgtgaatcgttagcctgcaatgtgcacctcattctgtcaaatgcgtggctacttattgatgaggtctgggggagtgtgctttcttcatctttgtgtctctcagaagtaaccaaataagttctcaaaaactgctggcagaaggaaggcacgttaatggtggatgtaacattattcatttcatgaaagaaagaaatcaacattaaaattagaaagcattgttttaatttctgaattgggtacttggaatggacattcttcacaattttcactgggttatcataaaatctttattaattcaagtcttttctcccccaagaacatttttctattaaaaaataacaaccaccaccatgaactttggtgtggaggggcagtgaaaagagtaatagtgagagggagagagagaaagaagaatccctgtgggggtgcaacaagctgctgctaaatttcagttgcagttgtcagagttaaagaaaacattggagaaaatgtctcatcaaggggtccccggatttttctgctccgggaaggctgcctgagggatggatcgcggccagctggcaggggctcagacgcctggtaccgtgctgcagccactgagctcattggctccacctaagtcattttacagtcagagctgtttcaagatcagcacacggcactgtacagatgtttggggtcggggaggagtagaatttgtggaaggaagaagtatatgcttagttttaaaggtttcattctaggacctctcagggttctggtgaaatggatcatgtgagagtgggagcacagctgaccaggctaggcaggacagccctgtgaggcagtcttgattttacagaggaggaaaatgaggcacggagaggttaattaaccttttgagtgtcgcagtctaaggctcagaggcacagttccatcccaggtctgtctgaatcccgagtcctcactcccgattcaccaccttactccactgctgagaccatccctgtgagtccggccactcagtgagttaaggaggccaatggccatgtccccacggggacatctctctcctcctgagagtctctctcatacatctcaaatctgagatacagattgagaaacaccccaggaaatccactgcatggaaggcaaaacaaccttgagccacagcagtgaccacaagcaagagaagcctggctatgagcacagtcatgatgtagttcaaggttggggaattcaaggcctccatgtccatcccaacatcttcagctcctcctcacgtcgccagtggatgtcctctgcaagctgatataaattattttcaaacccagatatacattcctgacttaattccactctcctcaaactcgcccacggaatgcctctaacagaggggagcgagggcacaccctgggaggcccgagtatgtatcctgtggcattacatctcaaaaatgatatttactcaaagatgctagttttaggtaaaaataaattattcaaatgtattgtgaaaatgttattggttttttgtttgtttgttttgtttttttgagacagagtcttactctgttgcccaggctggagggcagtggcacgatcttggctcactgcaatctctgcctcctgggttggagcaattctcctgcctcagcctcccaagtagctgggattacagccatgcaccaccacgcctggccagtttttgtatttttagtagagacggggtttcgccatgcttgccaggctggtcttgaacttctggcctcaggtgatccacccacctcggcctcctagagtgctgggattacaggcgtgagccaccgcccccggccatgttattggttttaatatgaaaggatctgttttccaaatctttgggtgagattgaagatccaggaggatatatcttgttgatcatatggcttgacataagtacccacgcagtactctgatttaggatccaggggtcttccaggtcgaattagcattttcaggggtattctgaatgcccaaaggagtgactgacagggacttttcggtaaaatgaaatatctcatattcagggtatgttcgtgcatgtactctttctgttatgtgatttccattgtctacatcttcattaattctaagtaggaaaatagaggctggggaccatgtccttcctggcatcactcttgtcaggccctgtgggtgactgcttgcctttagcactggtgaggcccgctgtggggtgggagaagtctttaccgtcatcagtgacaatgactagagtcttcagtgtatgattcctgccatctgggagtctccataaaagcctcaaggccaagagggtctccaggacttccagctcagaagtcccctttcattcagtgataaggagaagataaagataaacatgtggcctgggcagtttcactctgtgtgatggaggcagcttcactccttccccatccctgtggaagcagctgaggctctggagcacaacttgggctgagaatcaccctcttcttcctggggccgtgactcaagcagacaccgtggtcagccttttgatgtgcagctacgtggacaacacttttcctgagcaatcatcccctcttttctcatctgtttgggcacagaattattggtgaacatccttcatcatcaaagagcgacatctgagtgcgtcttcagtggtgttctctggagataagagcagataagagaacatcatgcttgccactgcctgatgaggggacgttcacctgcacctattaattaaaatagaagacacccaatgggcattgggcaccaggggctgatgtttgtattggaatataaaaaagagacttagacttagctttctcttggcaccagcatcactattaacacttactgtctgtcaccaatcagcaacctattcccagtataatctgggacttctatagcacagctcaacccttccacctctctgagaggagtggtggggtagcccttctcctgacagcaggagcagatcgtactccctgggacccagttccccctcaaaactcattcaggaatcatcacacatcatcgctggccacatctaggatgtctgaataattgtggttataatcgatagtgtaaaaaatcattagttataggtaacatgtatggcatttaccatgtgccaagcaccttttatagtactttacacttagtaattcacttaagcctcacagtagccctacaaggtatattttcctcattttacagaggacaaaactgagccacagtagttaagtaacgagtcaatggcagagctgggattggagccccggcagcctgctcatgcttgctatggactgaatgtgtcttgcttcaaatcccagagttgcagccctaacctccaatgtgatggctgcatcatggggccttgagcagataactagggttagctgtggtcaggagggtggagctcttgtgttgggattagtgcccttctaagggacagcagagagcttgatcacactctctattcatacacaaaaaggagcacatagtgagatgggaggtctctgcaagccaggaagaggtgcttgccagaacccaagcatgctggctccctgatcacagacttccaacctccaggactgcaagcagatacatatctgtggtttaagtcacccggtctatggtgttttgttgtggcagcccaaggggacgcagatgatgcttttcaagactgtgcagcccctcctggaagcttcagctccttggccttgcaagaaacacttgctggtcactgtctttggtcctttcagaggcccttcctcagcggtgcctccaccaggctcctgacttcatccccctctgtgggaggaggggtgagcaaagtaccttctccctctgctgtgggaagcatgagtaactcgcagatggtgtcagagggcgtgtgttcaggtagtgcagccagcagtgagtgaatgaaatgaaatggtgtctgtctgttccaaggctgggctctgcaggggcaggagaacagctttagtctctgcatccctgcaccttccacctgcagatgccagcgggccattgcaggtgggaggggacccatctcagggctcctcattcagatggtgacaaggtgaggtggccgtccaccctatctttatcagtatctgtcctaaatactgcgcgttgacattgacgctaatagtctgaattatcaggggtttggcaatcgttaggcatccaatttttctctcctggacgggcatacctttgctatgtcagcacagtgcctctcttggctttctatgtaaccacaggaagattgcaatctagaaatagtgattgttaaaattgcctataagtacacaatataaacaatatgccagagacacacaggcccccagcataattcctggaagctgcagtctcacctctgccagagaagagccccagcaaggattgaggctgggcatccaggtgcctctgcagcccttcccgtggctccagctggacaattgcccctgagacacagaagatagagactgcacgtgtgtcttcagtgaacgttgctttatttatgttgttgttaaaagtgaaagagagtacaaactgccttttttttctgagacagggtctcgctctgtcacccaggctggagtgcagtggcaagatcatagttcactgccgcctccgcctcccagaatcaagcaattctcctgcctcagccccccagatagctgagactataggcacacaccaccacgcctggctaatttttgtacttttagtagggacagggtttcaccatgttggccaggctgatctcgaactcttgacctcaggtgatccacctgcctctgcctcccaaagtgcagggattacaggtgtgagccaccgctcccagcccagactgcttatttttaaaccacacagtactcgttttaaacctgtcccatttttaccttggaaataaaagtcgcgtatctcaggggcgatatactgtttctctgcctggtttcccacgtcacgacctgtggagaatggcctaggaaccacctgtctttacatccagataacagcttcaggaagatacagcagagtaggacaggggtcgttctgggtgatgtaaagtagctatttggttagaccaacattttggtctctaaaattgggtcctaaggagaaaaataggaaattaaaatgatcactacctgaaaaagaaaaatcaggtaataatttgagggagtcaagggcctcacctttctctcaaataagtaggcaaagaacagtaacagcactccccctcctcacaccctgtttaggaaaattgggaaatgtcttcttctcactgcctgcctgtttatttaacaatgaacaagagtttaaatgttaccaccaattcaaaccaaacacaccccattctctatgtcctgaatggagagggagtctagagttcttgtttgcttcagggtttcctttctggagctttatttatttattttttattttgtttaactagtcaagggcaagggcagtagtgagaagtggggaaagagaagaaggggcagttggatctgtacctgactgtgaataaacagtggaggtaactcgctgcctccagaccagcctcctctgtagagcttgtaaccttgggccatcctgcaaatcagtggagagcagttgcttcggtcctgaatagctcacagggtggtgggaaggtttgccagagttgtcccacctcatgcacactccctttcccccatgagccactggagtggaaacagacaccataccaagtgctgctgaggatgtggagcaaccggaatgcgcctgcacttgctttattcagacagccactttggagatctctttggctgtgtctaataaagctaatcacactcttcctgtatgatagagcaaccccactcccaggtgttgacccaaaagaactggaaacatatgtccacacgcaaaaaaagacttgtagaagcttgtaaatagcagccttattcttaataataggcccaaactggaaataacccaaacatccatcaacaaggagaccggataaacaaattgtgatctattcgtgcaatggaatacgattccaaaactaaaaaggaatgaattacaggtatgtgcaacagcatggatccatctcagagacatcatgttgagtgaaagaagccagattcaacagaactgtactctgtcatttcattcatatgaagtttgagaacaggcaaaacttagctatagtgatagcaggcagggcaggaactgcctattgagggtggagattgaatgaaaaaggcacgggagggctttctgggataatggaaatgttctatattttgttttgggtggtaggtagacaggtgtagacagttgtgttaatggctgaagatctgtgcattttagcatatttaaattataacccccaggaagcattgcctcatcttcctgggggatgtataagcttgttaagagcatactgggggtgcttttgagaaccccttaccatgttattatgttaatgaaccaccactaatttttgtggtttcaaaatagcaaggttcattgataaaactcccttgtgccttggtgacaaaaaacactgatacaacccactgtcaaagtaagtgtgtttgttatttttgtttttaatgacactaaatttgtaggaatgatatttttaggtggttgctcaatctcacccgccatcagttgcaggtgacagggatgttaagttggcagatttttgtgctagaagctgtgggtttacatctcctttgtgcaggtgtcctagacataccagtggcttgttatttaaacatcgggatcgggtgtgtgggtggtttttaagttatagtagggatgcaggtgctgtgggatcgcttcattgtttaacaattcctttgcattcacacagggcttctgaaatgagtgctagtagaatcatcttcagaggatgtcccaatacgttgaactgagatgccttcctgtttgctgtggaattaagcttaaaattgacaccaagctctaggcatttcgtacagggagagagtgggcatgaatgatttcgggaaatgaagaactagatttcagcctggaatttgcttcctccctcctgtggcaaattagcgtgggctcactaagcacttcatctggccatggtattttctttttcttcttttttttttttgctcccagatagggtcactctgtcacctaaactggagtgcagtggcacaatcatagctcacttcaaccttgaactcttgagcccaagcgatccccccaccttagcctcccaaatttctgggactacaagcgcactaccacacccagctatttttattttttgtagaaacagggtctcacgatgtcctggctgatctgaaactcctgacctcaaaccgtccttcacctcagcatcccaaagcgctggaatgacacgcgtgagccaccacgcctagccagttttcttttctgttgcattgcagagttagggccaatttcattcatcctgcactgatatttgccttcccagcagatgatgggtgagctcagcacacctgcatctcagccaagcctttagaggggagcacagctctttattgtgtcagcgccacacagccaccctgagcaaataggtttggaatgtacattgccatccttcctaaaaaggttcatagtaaaaagagaaggagatttaccttttgacatgcacgctcatgaaaaccaaggttttcagaaagccaaacctcaaaaacaatacaaagaagctcccttgacgtttgaatggaaagaaattttaggaggcaacattgaggggcaaggagggctgagaagagaaggtggcaatggcaactgcaagggttcttccaaatccgattgtcctgacaggttttgttttattttgttgttgtgttgtcgatgctgggtgggaatggattggaaaaattgtcccctcctgtgtttcttttcgtcttttaactttacaagtgctcctcattttcttttacttacaatttgaagttggcactggtgttgctgggccaaccagcatcttgaggactcaactctctggctgcaggtgctgtggggaaggggcagacttaaattttcttctgtaaaatggggacgggggggattaaataaaatgctttatgggaagttctggcacagagtgacgcacgaagaaatttgagcttccttctcctcacaggtgaactgttgctgctccacctttattacatcttttcaaatccacgccacattggggaacacaaactgaccttatgtagccctggttactccagcctttttaaaaaaaaaaaaaaaaaaaaaaaagcaagggaaataggcaagacggccaaataggaacagctccagtctgtagctcccagggagatcaaggcagacagcgagtgatttctgcatttccagctgaggaacctggttcatctcactgggactggttagatagtgggtgcagcccacggagggcaagccgaagcagggtggggcgttgcctcacccgggaagcacaggggattgaggaacttcctcccctagccgagggaagccgtgagggactgtgctgtaaggaaccatgcattccgtcccagatactatgcttttcccatggtcttcgcaaactgcagaccaggagattccctccggtgcctacatcaccagggccctgggtttcaagcacaaaactgcatggctgtttcagcagacaccgagctagctgcaggagtttttttttttcataccccagtggcacctggaatgccagcaagacagaaccgttcacttccctggaaagggagctgaagccagggagccaagtagtctagctcagtggatcccaccccgacggagcccaacaagctaagatccactggcttgaaattcttgctgacagcacagctgtctgaagttgacctgggacactcgagcttggttaggggaggtgcgtccaccattactaaggcttgagtaggtggttttcccctcacagtgtaaacaaagccaccaggaagtttgaactgggtggagcccactgcagctctgcaaagccacagtagccagactgcctctctagattccccctctctgggcagggcatctctgaaagaaaggcagcagccccagtcagggtcttatagataaaactcccatctccctgggacagagcacctgggggaaggggcagctgtgagcacagcttcagcagacttaaacgttcttgcctgccggctctgaacagagcagcggacctcccagcagagcactagagctctgctaagggacagactgcctcctcaagtggattcctgacccctatgcctcctgactgggagacaccacctctcaacaggggttgacagacacctcatacaagagagctctgactggcatctggcgggtgcccctctgggatgaagcttctggaggaaggaacaggcagcaattcttgctgttttgcagcctctgctgttgatacccagacaaacacctccagcaaactccagcagacctgcagcagagggacctgactgttagaaggaaaactaacaaacagaaaggaatttcatcaacatcaacaaaaaggatgtccactcaaaaaccccatctgaaggtcaccaacatcaaagaccaaaggtagataaatccacaaagatgaggaaaaaacagcacaaaaaggctgaaaatttcaaaaacgagaatgcctcttctcctccaaaggatcaccattcctcaccagcaagggaacaaaattggatagagaatgagtttgacgaatggacagaagtaggtttcagaaggtgggtaataacaaactcctctgagctaaaggagcatgttctaatccaatgcaaggaagctaagaaccttgaaaaaaggttataggaattggtaactggaataaccagtttggagaacaacataaagcaggaaagatccaaaattgacacccaaacatcacaataaaagattacattaaaagatctagagaagcaagagcaaacaaattcaaatactaggagaagacaagaaataagtaagatcagagcagaactgaaggaaatggagacatgaaaaacccttcaaaaaaatcagttaatccaggagctggttttttgaaaagataaacaaaataaatagactgctagccagactattaaagaagaaaagagagaagaatcaaatagacacaatgaaaaatgatcaaggggatatcaccactgatcccatagaaatacaaactaccgtcagagaatactataaacacctctatgcaaataaactagaaaatctagaagaaatggataaattcctggacacatacaccctcccaagactaaactgggaagaagtcaaatccctgaataggccaataacaagttctgaaattgaggcaatagttaatagcctaccacccaaaaaatgcccaggaccagacggattcacagctgaattccaccagaggtacacagaggagctggtaccattccttctggaactattccaaacaatagaaaaagagggacgcctccctaaatcattttatgaggccagcatcatcctgataccaaaacctggcagagacacaacaaaacaaaaaatttcaggccaatatccctgatgaacatcagtgtgaaaatcctcagtaaaatactggcaaaccgaatccagcagcgcatcaaaaaacttatctattaccatcaagtcagcttcataccctggatgcaaggctggttcaacatacgcaaatcaatgaacataatccatcacataactagaaccaatgacaaaaactacatgagtatctcactagatgcagaaaaggccttcaataaaattcaacacctcttcttgctaaaaactctcaataaactaggtattgatggaacgtatctcaataagagctatttatgacagtcccacagccaatatcatactgaatgggcaaaagctggaagcattccctttgaaaacaggcacaagacaaggatgccctctctcaccactcctatttgacatagtattggaagttctggccagggcaatcaggcaagagaaagaaataaagggtattcaaataggaagagaagaagtcagattgtctctgtttgcacatgacatgattgtatatttagaaaaccccatcatctcagcccaaaatctccttaagctgataagcaacttcagcaaagtctcaggatacaaaatcaatgtgcaaaaatcacaagcattcctatacacccataacagacaaacagagaaccaaatcataagcgaacttccattcacaattgctacaaagagaataaaatacctgggaatacaacttacaagggacgtgaaggacctcttcaagaagaactacaaaccactgctcaaggaaaaaagagaggacacaaacaaatggaaaaacattccatgctcatggataggaagaatcaatatcatgaaaatggccatactgccaaagtaatttatagattcaatgctctccccatcaagctaccattgactttcttcacagaattagaaaaaaactactttaaatttcatatggaatcaaaaaagagcccatatagccaagacaatcctaagcaaaaagaacaaagctggaggcatcacactacctgacttcaaactatattacaaggctacagtaaccaaaacagcatggtactgataccaaaacagatgtgtagactgatggaacagaacagaggcctcagaaataattccacacatctacaactgtctggtctttgacaaacctgacaaaagcaagtaatgtggaaaggagtccctatttaataaatggtgttgggaaaactggctagccatatgcagaaaactgaaactggaccccttcctcacaccttatacaaaaaattaacttaagatggattaaagacttaaacataagacctaaaatcataaaaaccctagaagaaaacctaggcaatgccattcaagcatagacatgggtaaagactttatgactaaaacaccaaaagcaatggcaacaaaagccaaaattgacaaatggatctaattaaactaaagagcatcagcaaaagaaactatcatcagagtgaacaggcgacctacagaatgggagagaatgtttgcaatctatccatctgacaaaggaccaatatccagtatctacaaggaacttaaacaaatttacaaggaaaaaacaaccccatcaaaaagtggctgaaggatatgaacaaacatttctcaaaagaagacatttatgcggccaacaaacgtatgaaacaaagtttctcatcatcactggtcattagagaaatgcaagtcaaaaccaccatgagataccatttgacgccagttagaattgtgattattaaaaagtcaggaaacaaaagatgctggagaggatgtggagaaataggaacgcttttacactgttggtgggagtgtaaatgagttcagccattgtgaaagacagtgtggtgattcctcagggatctagaaccagaaataccatgtgacccagcaattccattcctgggtatatacccaaaggattataaatcattctactataaagacacatgtacacgcttgtttattgcagcactcttcacaatagcaaagacttggaaccatcccaaatgcccatcaatgatagactggataaagaaaatgtggcacatataaaccatggaatactatgcagccataaaaaaggatgagttcatgtcctttgcagggacatggttgaagctggaaaccatcattctcaggaatgatggttagttagcaaactaacacaggaatagaaaaccaaacactgcatgttctcactcatgagtgagagttgaacaatgagaacacatggacacagggaggggaacatcacacaccaggacctgttgtggggtggggggctaggggaaggatagcattaggagaaatacctaatgctaggtatttctaatgtaggtgatgggttgatgggtgcagcaaaccaccatggcacgtgtatacctatataacaaacctgcatatgttctgcacatgtatcccagaacttaaggtataatttaaaaaaaaaaaaattaaccttttctagtttgtcaccacattcgtggacagctagtcctggggcactggggtgcatatgattagtggcatggctgaagctaatgcattcacaaatcctgatccgcaggtgcatgggtgtcccttgttaatgcgcctagtctgacccagggcagtgctgcacagctcattggctttacagtcagacaaacctccaatcctgtgtctggctctcaccagcttgtgtcctaatgaatcaataattctacccacctgacgctcactttcctgtaatttactgcagtgagttcctaggcatatggcatgtaaatggtcagtagatcaccttagaaggatttcagactctgggtctcagtccatctgtgaaaattaggatggtaggaacctctctgagatacacctttaaaattagttatgtgtgtcacattcacagctcctagttttgaagaccagcaacagaacaatactttcaagtcttcatataacctttattaatttaggacaggcttcatattttcaacaagagaattcaaagttcattttccttttttccctcagcaactaaagttctgagtttcataatctgtttcttattgatacataatattttacatatttacagggtacatttgagttacaatctattttaaatgatacattatgtaaagtcactgtgttcttaaataaatacacatagtgaatgatcctgcatgtatccccacaagtacagcttgaacaagtccatcttccaggggccaagcaccacctcaggcatctgtagcatgagcaaaacccaaggtcccctctggagaccctgtttaccctgcaggcaggacaacaggagctggaaggagcaggctgatccaatccctttcttgtggttttcttggttggggagagagagttgagttttgccaaaatacatgtgttctgtagaagaaacaggaaatggagatacacaaagagatatgacaatacaaatcaccagttgggccacccagatcctggtttccatataccgttccatgcattgttcctgagcatgtaagcatgcccacacttgaaggaggcactctcaagtccatcggggcctgggacaccccactgtttttgaagtcctggaatgtttttgtaaaggtaaggaaataccaaaacgagactacaaaaatgatggtatctactgatatgtattgacaaatgtgtaataaagatgtgtacgtgtgggtgtacctcatctaggggtgacaccttcaagtttaattttgaagcttgggccagtggtgcttcctttcccacaaccaccatgatagatcctctatgagatgttatcacagaacccatgtttctcagtggcagtagaatacgacatactctgtcaacaaatataattctacattactttaattgcttgcatggaaatccgttgtatgtaagtgccatggtacatttaatagatcttgtcctgggacatctacttctggtttctttgatagactagcactcttgtgaatatcattgtacttgcttctttgcatgttttcttccttccttaggatgaattctgagagatgtaattgatggggcaaaatgtactcacacatttttaagggttgtaaactttttggtcaaaagctggtactcttggttgtttgaaaaggaaagcaagtcctcccattccagggttggattttgactcttttcctgtaaacttcactgctttttggtttaattgtcataaaatgccaagcaccaccaacagggctatgggaaggggcccagaggcaggagggctgtggttaggcatggctttggccagatggggaagctgggtgcttgggatcagggtaagcgggtggggatgctgtgagtatagacgctaggcagggaagccctgcagggcagagggagcggcagggctgcagtgcatttggccgtccagctggagcagaggatggaaaccgaagagtgggttgactcttggatgccaggcttgagtcaggtgaatcctgccctcattttactgtataaagggagctactccaggcctccaggagtcttagaccctcccagtccctgtgggggtcccacaggtggttaattgtgcctcaggccctctgctctccctccctctgtaagtctcactctcctttgcagtgagctctagcgaaacttctattccagtaggaccaaatgtttgaggcctccagaaaagaaatccggtgaacacggagggtttgtcacactaacttgagtccctttctcaggtggcccacccttgtaggccagcctcccaattcctagccagctccaggctccgggcttttgctcattcaaaaccaaaattgaaggcatctgccctgctcaggcccccatctctgttcagagtaaactcctccctccctctgcttttgccctaagttctcttttcaactcacctaacatctaacttggccctgcagctctgatccccaaaaccctctctacctgttccctcccaagctatccctgaccagcatgccaggaacaaggaagtcttgaaagctgcactccttgctgctctcccctgtcctttatccttccacttggaatctctgtccttctacccatctctagctactgaaatcgtgttcatgtttccaggcacatctcatactctgtcgtctttaagaagtcttcccagaaaccccatcgtttatattcgtgatatataccatattccactgtgtaatgtagattgcaccagagagtatttaatctcctgaaggcaaggactataacctattcatcttcctttcctgggtggggagaaccaccatgccttgtaccaagtagcgatgacatgggtcctggctccatgaatgaacgggcattgagagaaaaggagctgatgatgagtgaatggaggagcctagtgaggcaacgtttactcctcagtgaagcagtgttggtgactccaacagctctctttaggaaggatttaagacaacatcctgttcggaaggggcttgaagcactttataaaagagaggcaagggcacacgtcaaactagaagaatgaaagtaagaagagagaaggctgcagagaggagcaagccccatccgtccccctgatggtcctgccagtgcatgggttacctctcattgcatttagtgcggtctgttgtttttgtattgtgaaatattatccttgattacattatgttgctctgtttttgaaagagaaagtattcaagcaagtgtcacttctatttcttgcaggcaactatggtcctgagctccgcacacttctggttgggattatttctggttcctactgcctgtttgattgaagatgtggcatggagagcgtaagtttaacagtgaagcggggaccctaagtctggctcatctgtccctggaattgtctttctcatgagtcctgctacagggtatgagaatgacaggaattcggaagaaatgggtctcctgccacctgccagaaatgaaaaaaaaatttttttagtttaacttgtgcttcatcttgatatgaaaatatagacaaccataacaatagaaaaatcagctgggcatggcagcgcatagctctagtctcagctacttaggaggccaaggtgggaagatcactcgagcccaggtgtttgaggctgtagtgagctatggtcgtgccactatactccagcctgggccaacagagcaagaccctgtctttaaataaaaagaaacaaaaagaaaagaaaaaatacagacacaaaggagccctgagagaaactatgaagatcaataggaatgttgccttatataaaggcagagtttctgagtacacacccattccatcaaattgagaaagtataactcaaaactcatctctctttatatcataaactcagtgctaagtggtcacggatatggcctggcttcacttcccatgcttagagggaagctatgtataggtaagtcatttaaaattacaagaatgaagtactcttcatttttccaaacaactcatagtaggaatactttcagtaaaattcttctagaggattagttcacaggtctgtgagaaaaccagtcatgaagatggcattatcatgtaggttaaataggaaatcattcatattaaattttgcttttatgttttaacatatattgttttcaagataccttgttacaatataaaagaagcgactaagttccaaggtcatgtaaattttaattttatccatgagcaaaaggagggctgctccaagtaaaataggactgatttttgttttgggtcgacccaatttctcctacaaataggtgccaacttctctgaaaattgagactccgagctcggctttactttgggcaaaacacaattattttggggctctgagatagagaagtgagactttaatccaaaccttccagggaaagacatcagatttcatttttagccctccgttcctcccacactcagaatttttcttgcctgacagttatggaagtcttttgaaaaagtcctcattttggcattatcttgacaaccgatgatacctcatgcaaatctagatagagggggaaagaatattataacatggattttctttttttttcctgttcactaagttttttaactgttaaaaaattaaataattctcatttcttaaattctttgatttaccattacttccattttatttggtaaaaccatattctgcaaataacagaatcagaatcctcagaaatgaaaagattacagccagaaaaaaatattttcttaatctaatagatgtaccataagaacatagtagttttggccaggcgcagtggctcacgcctgtaatctcaacactttgggaggccgaggtgggtggatcacaaggtcaagcagtcaagaccatcctggccaacattgagaaactccgtctctactataaatacaaaaattagctgggcgtggtggcgggcacctgtagtcccagctacttgggaggctgaggcaggagaatcgcttgaacctgggaggcagaggttgcagtgagctgagatcgtgccactgcactccagcctgggcgacagagcgagactccgtctcaaaaaaaaaaaaaaaaagaaaagaaaagaaaaagaaaaagaaaagaaagaaaatattagttctgttatttgctctttcagccaataggcccaattgtgacacaatctagtcccttgctgaatttgttcaaaatctttgttttgcaaagataagtcagttttagataaataggccacatcagctggccttttctatttatagtgattgaaaactagtaacatgattataaattagtttattttaattcagctatctcaaattagtgtcattaaaacaattctattgagactgtatatttgcagaagactttagcaatagtctcttccatctgaaagagaatgtttatagattacaaagtgtctgtgcttctttgtccattttctggctcttttccagtgcgttctgagtaatcattccctgtcatcacaaagcaaattatctattccctcaaacaggacttgtttttggtttcccctggcactataaaattagcaccatttacattttaacaaggataaatcaaatgacactactcccagcttcaccacatggaaagagtaaaagtcacttcctttccaaggagcttgccaactgggtcagagcataaacccgggctctgcagtggaggtgcccgcagggcaagcaaggaaggctaagggtcgtcactctgcagcaggagcactcggccacccagcacctggcaccacgggcccagaactcagcttttccggggagccaacagcatctcagctctgggctgagccagaaaggcccctgctgaattccagaggtgctttctaaaatggatttttgtcttgttttatttaggggagcagggaaaatagcatatattggctgtgagctggaatatttgtccgaagcacatatatgctcaatttgtaatatctatttaatatctaaactaccctcacccctctcctcaaaaacaagacatttttcagtttattggtgcattttccctttgatcgtgaggcccatattatgtctcatattatgctccaaacccgaagtatttgtttttgaggcaagtaaattcggaggcttctcacaaaaagagaatgcctattgtgaatcagttacctctgagaagctacagtgcttcactgagatttctctttctgaactgcagctttagaaaacgctgttggcttcttcttcccatgcactgaacaaaaatattaatcctgcttgtcccgaaccacccatccttggatttgagttgtcaagtatctactgaggcacgatatctgtgatgcaccttggggttcccagaaagggtgtgtatttgagagtgggcacaggggcagctgaagaccctaccctgtgatggcagcatgtggtgatgccgggagagcttccacaggggtgctgcgggcctctcatcttgccttgggcccatcttaaggatgttttattttgttctgaactttggtggttatcactctcttttgaaagggcttttagaccaggcacagtggctcacacctgtaatcccagcactttgggaggccgaggtgggcggatcatctggggtcaggagttcaagatcagcccggccaacatggtgaaaccctgtctctacaaaaatacaaaaattagttgggcatgatggcgagtgcctgtaatcccagctactcaggaggctgaggtgggagaatggcttgaacccaggaggcagaggttgcagtgagccgagatcgcaccaattgcactccagcctgggcgacagagtgagactccatctcaaagaaaaaaaggcttttaaattccagattaaggcaggcctgccttttcaagtatatttctgtgagcactgaagaaagtgagttgctccatctttctacattttccccatttctttgcccagtttctcgcttccatttcaggacctgagctgttaagagtaagaaaagagaaccagaatgaggtaattcaatcactttttccatgaagtctgtcagctttctggatgaagatccattattagactatcttaagtcagatttggcacgccataaaatgcctacgctattatcctgctaaccaaaattttcatatgggacaaaactaagctaccttttattaaaataattgattgattatatgtgatacctggctaatgagtaattttgttagatgcatgaagtttaaattgcccagaactattttaatatccctgcgcttatattcatccaaaatgtttactgatgacagcatgcttaggtaagctgccacatacccactttcatctaggtgaaatttgttagtattgctttataaaaataatacaagctcaaggccactgaacacagaggaacccatttgcttttatctagctgtatctcctgtattttactgtacatcaacaatacagtccccgattccagaatgacttcatttccttattataatcccagataggcagttaaatggaaagaagaggtaatgagcaatttctatacacaaatgggccttgatttcttttaactttctaactaaactaatttcttttgcagcacgttacatttacacttccatccaggtttagaattatatgtttccttttgacttgctgttcttgcatacaaaagaagagtccagggaaagagtttcagaaaaaaaaaaaaaaaaaggatggaaagttcaagatccttaaacagtctatttcttttaaaagtctctgagaacctggagacacccttaggtatatctgaagacccacagacaactttcacactcttgagtcagtagccagcaccccaactctgtcccttctgtggtcatccagcctctcgatgtggggttagatgaagcaagccctggaccactgggcaataagccatttacagataagggacttactctgtcaaagctatgactcagaacacgccaaacgccagctcctggtaagacctaagtgacatgccagtggctaatgcttaacaactgactttataacctataaatattaattttagaccactcacatgtagcctttagacaggggagattttagaatcagtttttctaattcaggcgttattagataaaggtgcttgggaacagggttttaaattgccagcctccctttactcaggtgctgttaaatgcatgcagaaagagaagttgaatcatccccagcattgcaattcagtgttttccaatagcaacaaagttcccaggctagctcacaggggctaaactagtggaaatagtatcaaattgctgagtaactcttgaatatgggcgcagtttcatcccctgagagcacgcacaatgcctgggagcactgacatgctcagaccattgccctctgaggccatgttgtgattgagtaaaaaccagcagcttccacagtgggttggattctgacctaagctgtaggttcccagtggccaaccttcctattccagcctcccacttaggaaccccctttcctcccagcctgggaaataacaatggggtctgttctacccctgtgcaggggaaaggggagagggagagagagggagggtgatggtggagagagggatcctggaagaaccagcgatgctgctcatccttcaggagtagccaggctgttctaggacccatgcaagcccatggctcagggcaggcggggcaggcactcggtggctttgttgtcagtctaaccccagaagcccaggagataaaagaccacttttggggccccacatgttacataataatgaacggggtacattttaacatcgtttttgactctcctttccagcaaactgttagatatttgctcatttcttgtttaaattaaaattccacaggctctgctttgaactgcagtattttatcaatcctgagtctcaggacactgtttgatggaattaagtaaggtattatgtgttaaagcctgtgtggctttcccttgtttactttgggggaaaggatgacaggggcatatacagtgtctcagtgctaatactccattatagattaactcggagtgtcgggagatggctcacattatcttaacaggctttctttccttgaaggtggagggtgggtgaggtggtacaggattctgcaggaagagcccacatcttcagaatgttcccatgacaccgttttcatttctgggcaaaggtgctcagtttttgttctcattctgtctttgggtcctggtacatagcaggatcctcacatgtatttatatttaaattaaaccgatgcaaagcttttcagtctggtgtgttactaatttatgagccttttccctttgcagtttttttctcttatataacctatatctggttaaatgtcttttcacctagactgtttccaactagtagctagattgtttccaactggtagctcacttttagcttagtttagttttcattttataaagactctgagattggccaattatttgagcattgtgaggtattcatcttagtgtcctcagtaaaagggtagagggaactcttcctaccattcaagaagagtgagctgtccaggctgcgggttatttcataagttgtattaatgtcactgaggcctgcgtgtgtggactccaatggtgagttgttgccagaggaagatgggaaacctgcactctggatttgtgttgactccacgtttcaagcctctggttttgcatccagaccatgcactctagcatcctaagccccgtggctgctgtggcagtggctcttttcacgctaaagagggagggaggaaacttgctaacccctgggctctctgactgcagttggggtccttggaccagggaaccagtgcctgttcactaaggtgagggtttaaagtgtcttcttggttttcagttcctgacaagaaatgctgtagaggtagaccctgggtcttcgtgaaccccacccagtctttgagtgactgggctgctcggccgacttccggttctttgcggggtgggggtgactcttgacatgcatgatccgggtctggtctgcagcactcaggatacttccgggctgtggagatggaacctgggtcatgcatggagactgtgaaagctccaccacttcccgagcctcggcctccaccaaagggcatttggctgtggcctgagaggggagcggcctgtctttcccagctgtgtcaagtctctatgccatgttcgttttgtcttttcctcataacacagagccaagcacacctgcaaaaagacattgctggaggaggtgcaggagctggaaaccaagtctcgagtcctgggaaaagcggtgctgcgggatagcaatggaaagaggtggggaactccgtcccagtccgcacagaacacaggtgctcccggcccttttcccttattccttcctgtatttctttttctcatcttggttttcgatgggagcacagtatgctcaggcttaagaattttggttattctcagatttaaatcacactctcagtgactacatgaaacctaaatctctggaagtctccaggtaagactgggggttttattgggtttagaagtgagcaaaacaactcatgtgcagaaaatcgatgttgtggcagtattatcttaaggtggaagagtccagagttagcagtattaccacagaggagttaaagctaggcctttgaatttcaaacccaagtactgtacccaaggatgagtatctacagtgtgaaggtttgcatgtgaaataatgcatgttgttattcatgtaaacctgttacattccacttcagcatatctaaatgggggagtagtttttaatgctaacattttctgctgggagtgaaaggaatcgtgtgaactcctggaacagacactgccgcttgctctcctaattcctcctgaacatgagcctgcccttccccacaaggaacagctgggtctgtgtgcagtttttgtttcatcacacaagatgttaaaatgttgttagagtgcactctgttaaaatctatgtaccatcaagggaaatttctttgggcctgagaacaatttgcagggtactagaaagccattgctctattaaggacatggaatatctataatattctgagtacagctctcctataaatgcttagaaggaaatcagtaaccaactgctaatgaaacaaacatcaagaaatcaaatacttatagaggtccccactttgtgttttgctttatattgtgtttatttgtaccatcttttaaagcaatgaagacaaaataatttttttgttaaagaaagagaatgcaaacattttgagaggctttcaaaatacaatttcaaacagattttagaaaagggatgatggcatagagttgaagttgtggttttgtattgtatttatgagttattttttagtaagtttattaagcattcattttatagcagctatgctagccactgtaaaaaatcatcagtcaacaagacaaaaagcactgtcttccataagcttaagtttgtgaatacatggggatgggggctgattttaccgcagatgtacatataaccactacgcgtggttgaggcttgttcagggctgttctatccatcagacagctgaggcataaggctcaggacctgttagagtttcagggacctaccgtgctctttgagacctgaaaaaaaacatattcataagctccaaaaattagggagcaggaaacattgcataatgaaattaataaatgtttaaaaccctataaaatgcatatcactcttaaccgttaagtttagtaaggacaataagtttattatacttagaaacaacttacaggctcccttatatatcaagtatacacaatgattgctgagggggcataagtaatttctaagtaaaatgagaatttcagagcaaaactctcaaactcctctcaaacattttacaggacgacatcacatataatgtggtgtgagaatgtgctttagagtgtttgttctgatgtggggaggggtcatctggcttgagcaatcaagaaaggcttcatgttggagatggatgaacaacaggcttttgaggatgggagggtcttgaatggacagaactgctgagagtctgatttgggcagagggagtggcacatgccaaggctcaggtccaacactgtgtgcagggaccaaccacccagtttggagggccacatgcattttgcagagatacagaacctgcgtttgaattctggctttgcaacctaccggtgaggccttgtgcaggatatttcatatgatcagattgtctcttcatctgtcatagaagaaggctaatattttctttgggggattaaggttcgtgaaatatgtacaacgcagcatattgcctgacccatctcaggtgtgtaaaaggtcagctgctcatcttcactttggcaggagagtcatgagctgtcggccttgaattgtattgaaggaagtcgtgggctgtcagccttgaaagagtgtgtgagcccatttttgcttgttgttgataaatgaatgttatttttaaaattcacttatcctgttcaaaattcatttttaaatgttcaaatggatatcagaaaataagagcttaaatgcggtttcctaccgtctacatttgaaagtcttattttctggttccttgtaaatttcactttgtagttcatatgatggggtgtgtgtgtgtgtttctgtgcacgtgtgcgcgcacacatgcacgggtgggcctgcatactcccgtttggttgcaccattttccttttcttctagtcccagcatcttgcttcactttggaattcctagccagaacacagtttgggggctctgccgctcatcctcctcagtgaccccctcccatttgtttttctcactcctaattactcacagattttctgggtggtccatctgcaaactggataatggtggcgtgctgctctctgcacagagtctatgctgtcctgcttggcctcctaagctgcctcacaatttgttctcttacaacctttgttttcttctttcacacctgcttagattcctgaggggtggagggtagagactaagaagtctgtcttcagctctgtcctcccttctaaagatcttatagacccccacctctttgaggggtcctgagtgtttttgtctcttctcacccctccctgttccttctttcctaccctcatctgatctttcagctgatttgtgtatctctctagctgttaaccgcacaggaaactctgtcaatatttgctggctgactgactggcaataccaaagtctagtgaggtggtagtgaggaaaggacggtgacttcagtgccagatgagctgacacactggtgcctgtgtgtcagctcgtgtgtcggatgtgcacaaagtggccacagagagatgctgacagtcaccgggcctccagggagggggcagtttatctcattgcttgagagtacagctaacatagactcacacatggagaggcatctgtgatgtaagattagcaaatcttacccttgcaaagatgcacaggccaggagcccatcctccctgaaacccactccctctcctgccttcctgtgccagccaagccagggcacccccaggggtcctcagcatccctaaccccaggggcttactcagctcagtcctgacagcattgcttagggccccttaaaggacattctgccaggtcataaaacccaggtccaagtcactggcaaatattctagcagtttttcttaggaatgtaaccacaggaagtagaacaaaaaaaatctgtatgcattaatctttttagaaaaccctcttgtaccaaatttacaattacaattttgaaatggtagccagggattctaagtttctctctgtgccttttattcattcaataaaatattttcatccaacattttattgaacttgtctaagcctcatacttttatactattttgataaagttaaattttcatgaacatgcttctgcactttctcattagtagatcttgtcttccaaaatcaacctgtggaattgatactttaataagcctgttctcatgaagaagcagataatgagaaagggtgagatcagggaattagatatccagaaagcacagtgaagaaagtgctttagggagtgaataaaatgtttgtcttgattttagtttgttcttcttgaaggagtgtttttcacgatgtggtgtttgtgcgccttatagacactggacacgtgtgactgttggggttgatcagaataccttttcccaaactgtcttcccagtaatccctacctggggaagcaggaacccccccgcaccgcacatgaaatagtctaccctgcatgtcgttattttgagtgtctaaacaatgaggagctaaatggaagaaaattctttgttttttaatgtcttggtaatatctttcctttctttattcctgaagtgtaagccatgcaaatttctttcctggtgaaagaaaatctatctgtggccactcacttttacagatacaatataaaccgatgacggcgtgtaagatgacagacttttgttccttaattttttttggaatgagataagtggttgccctgtaatattttaggtacaatggcaagcaagaaaaaaaagggggaatatatttgttgaaaacatctagtttttgagttatgcatagcctgaataaacaaggagagcttgttctatttctagatcacctttcactctgttcatcccagttggtgggagtggggtggggtggggtgagcccagggctgatattctccattgtcaagggtaaacagacccggttgctgcccctgcctttgccaggaaggcagtggattatcttccccttaagtgctttccctgggtgtagcttacgctgtgactttggtgaaggtagctgtgtggctggtcttaaaccttctggcgagccgtcgcctcgtctcccttcggttttgtgttctgtgaacatctgtgcgtggccctgtgacccggggtaatctggacggcccatcaccgccagggaattcaggagggaaacctgactcttgctctgcggcttccatttcatccaggctgcctctaaacaggcagggccctggtcacagccttggacaggtggcctgggatcctaatggagctctctctgccgaaaaataggaacagagcctgaaccacagcagcaagatttcagacaaaccaaagattgttcctccactccaggcagtgctctcgagtgctcctttgaaaaccagtcgtattaaaaaaatgaaacaacacaaactcccgaatgcattctgagtgagtactcaactcaaaaatacctgtcatgctttgatctttaacggaagtcctttgatctttaaaacagtgttgaaaaaactgtttagtatcatcacacctctaagtcaaaatcagtcccactgccaggctgagcatgtcgctgagccagcctgaggcaggagggatgcaggccttttgcaccggactccaacaatgactgcgtcacttcaggaaatcggttttttcacagtactggccgttggcagtgcacatgtggtgcatctcccttttgctttcgtcccacctctcccacactttcctcctaaaatacctattattggctttttttccagccaaaaggataggaaattagggcatcctttcagcaaacctctccaggccaggtggcaaatgtctgcttccagcacctggttgagatttattttccttccagctgcattttttttcctcagctctgtcatgaagcagagaagcgagtgcagacggcggagacagatgacctgagctgggctctagcttagctgtgtggccttggctgggttattaacttctctgaacttcagttttctcatcatacattcgctttgaggtttaaataaataatgcagattaaatctatagcctatgtagatgttcaggaagcgtcccctaactgaaaagctgcataacaagtacatttcactggctgtgtttaccatctaacatgtaagcctggggaagatgtgaatgcagcaggctctccgagttgcatcgtcggggtgtgccccctagtctgaggtaaaagggagaaatctaacagaatcccagggacatgggagtggtgtggacgaatggccgtagtgaatgttggatgggggtgtggtggggactgtagtgagttctgaatcttggtggtctcctcaagacagcctttggattacagcttcaaggagctcctctttgtgaagaggacagtgtacccagtccaggctgtcccttctgccccaggatctctcgccagcttacccctgtccatctgagctgcagtctgtctgtaacgtctatgccggtccttgccactcctccccagaaccagcccttccttcggagtctcctgctccatcgggatgaatttttcccacactgcagactcgctctcagtgtccacactgtcccctcatgtcctgcgcatccctgggtgccaggtctcggcgtcttcccagcatctgcacagtcatcccccctggtcccttggggtggtgcctgtccctcttcacccaccatcccacagctgaagacatcctttgtgaagcacagcctcatcatgccaccttctgccctcagcccaccacctgctgagccagtgcagaccagaaccacagtgatttccgcctctgcttctcttctcacgtgtgcgaccctcagcttccacctcccctgtcctccccacgctgtgcccttctgtggttggtgctacccttggctcttcttgattgactggttttatacgatggtgttgcactgtgtcccaagcactgggccacacgtgggctactcaggggcagcaggacaggccttgtcctgggaacaaatgccgtccacctcaggacacactctctgatgtcaccaacttccctgctgtgctgatggcagcctgagcttcccttaaaacactcattttaaaagttttattttcgaccggttgcggtggctcacgcctgtaatcccagcactttgggaggccaaggcgggcaggtcacgaggtcaggagatggagaccatccatcctggctaacacagtgaaatcccgtctcttctaaaaatacaaaaaaaaaaaattagccgggtgtgggggcgggcacctgtagtcccagctactcaggaggctgaggcaggagaatggcgtgaacccgagaggcggagcttgcggtgagccgagatcgcgccactgcactccagcctgggggacagagtgagactccatctcgaaaaaaaaaaaagaagttttattttcattattcaaatattcaagcatacatagtagtagggagatgagcacaataagctcttatgaaatcattgcccaggtccaatcattatcaagattcggccagaactgcttcatctcaccccttctgctcagagtctttctttcctgaaacataaagcaaatcccaggcatcacgacagtccacctatgctttaggaggcatctctaaatattccacgagactttataacatctgtgatacacagcatgcttgtttatgttattaaatgtagaactccagtccccatgatcacatctaacaagttaataataattccttggtatcagtcaaacaacccgtccataaaaagactctctggatgcctcagccctgccttttaggattgattgatttgtgttaggatctgggcaaggttcacacatagcatttggtttctgtgttcctcaagttcctctgaatctggagaactttctcttgtttttttgttttgttttgttttgtttttaagatacagagtcccattatgttgcccaagctgggcttgacttctgggctcactccatcttcctgcctcagcctcccaagtagctgggattacagggatgtgccgccatgctgagacctgtcttcctggtttttaatgccatggacttattcattatgctccactttatttttttatcataacactgatccccacatgcagcaaatgaaagtttcctcatgtgcagaaaaggcgatgaggcctcagagagatggagtcacgtctgctcagtgtcacccaactaaagagaggcaaacctgcatcttcttacttcaggcctctttccaccaagccaagatgtggagagccacccaaatgcttgcatttgcaattacatctttattagagagactggaaagccacggagcccccagagagaccaggaggggtgcttaccttctagcatggtctgatgaaaagggtcacagtctgctgtctggtgaagctgcgtgcaaaatccaaggaagctagagaattgtagttgcatgttgttgtcttttagatccctacatgtaggaagaacttggaccaagcagagaaatcataccctccccccaagaaatgctgaagccaaaccagcggacaaattcagagcaaataaagggaaaagagtgtgtgaaagcggctcattttgtttgtttgtttgtttgttttttgagacagaatcttgctctatcgcccaggctggagtgcagtggtgcgacctcagctcgctgcaacctctgcctcccaggttcaagcaattctctgcctcagcctcctgagtagctgggattacaggcacccgccaccatgcccagctaatttttgtatttttagtagagacggggtttcaccatcttggccaggctggtcttgaactcctgaccttgtgatccacccccacccccaccccctttccccgccctcggcctcctaaagtgctaggattacaggcatgaaccaccgtgcccagccgcagctcacattttgatatggctcaggaaagagaagccttgctaaagaagccccaatttccacccacagtcaccttcgtggagcctagtatggtctatgaaaaaattaattgaatgcgtttaatcttgtagagcaaagaaccttgggcaaagcctaatgccggcaaacattttagttgagacaatggggagagttcttaggagaacagctggagagccaacgacgctcccaggcaaggccagttaaagctctcgccttgctgacaaatactcgcgacaggtgaggaaatgcattagtggaacaaagggagtgaatgtggcaggaaattaccgaaaggctgcccgcatgacccagccgggcttctggtgactgtttgcatcctgggcacaggaaggagaggaggaggaaaataaactcttcaggaagtgaaacacctcattagcatttagttaatgcctaagctgcctgtgtcaactaaaaataattgattctctgttattttaggaatgttgaattccaagagcctgttgttgttgttgttgttgttattgttcttatggaccgatgtttaataattagaaaatttttaaattaaataccagatgtcatttattattaagcatcttgttcacctttaaaacggtgctgtggctgtatcagaaatctaatcaggagcttagctacttgcccagtgctgcgatgaagaagtgcagcatctttagaaaatgcctggagagaaaatgggaagaagtgtcctcttgatggagggaggtaagtgtggagagaccatcagtgttagcggtttgctagtaacacggcctcaggctgtatttccaggatgacttgagtacatttccttttttgaattatgacttaaattagttccatgtcaactttctctatttgccaacaagactttttttcaagaaccatttttactgatgaatttattctcagttccaaacaaaactagtgtggacagctagctcactgtatccctttttaagtagtgatgaaatattttaatctttttggggaggatagttttatttaacccacttgagcagcaatagaaacatttaaaggtagatttgccaaaaaaaaattgccattgtataggtcacataatttgaatagtgatattatacattccaggcggggattagttcttcaggaggttctgggatctctttgctaatcgcttttctcctgcgttatcagtgagttgtttgcttttcccttcggcttcccgttttgcctacctccaactgtgactgatctctgagagtaagacattccagcctgaaaacaaacaggcaggtacacccatcctaaaattgagttacaatttagatgttatctgggaataaccggattctactgttcatttctcaatgagcctctccctaaattcttacaaaggcgtagagaagaagtgtagactcccaggccccccagcattcagggttaaagtgactttgtagtgcatctgagagaactgctggatccctgggacgtcctggactgttacaggcaaaaagaagactcaggagaggccgggcgcggtggctcacgcctgtaatcccagcattttgggaggctgaggcgggcggatcacgaggtcaggaattcgagaccatcctggcaaacacgttaaaacccgtctctactaaaaatacaaaaaattagccgggcttggtggcgggcgcctgtagtcccagctacttgagaggctgaggcaggagaatgacgtgaacccgggaggcggagcttggagtgagccgagatcgcgccactgcactccagcctgggcgacagagcgagactacggctcaaaaaaaaaagcctcaggagaaatgctggttgttttttattcatatttgatggctgcttttgcacactacagcacagagcatgtcctcccaggcccctgacgtggtctctgtcactagactagtgactagtctctgtcactagtggtctctgtcaccatttatgtatacactagttctgtaaagccagcacttggaaagccagtcaaggtccagttaggtcacgggtgaatgacatcattggccttgtggttgagaggaacttggagaatatgtaaaagttatcaccaagagatggtcattgtagcaggaatcactgcatttagcaatagatttattggatttttggaaacatttctctattaacaggaacagaaaaaaaaattattcttgggtttaaaaaaacctggcatggatctcatgctggtgtatctaagagtaaattcttctgtagaccaggacacgtgaatgactgtcacagagcctggattgttagtgattcagtgagtcccagttaagtcttccttttctaatagggcagtgataatatgattattcagtgtttattctctttctctggcaattaggattggctcaaggccccttaggtggtggtaattgggacttcacagttactaatgagtaaacatgttggcctcatagcaaatagaaccagtgattggcctaatgtggggcgagtcatttatgtatccacgcaacagacatttattaaaaacggaggaagtgccaggccagactccggcctagaatgagagagggaattcctattgctttagagctcgcctggtagtgggagacagtgagtggtggctcctgggaggaaaatgaaccagaggacataacggggagtgaatggctgggctggagcagtcagggaagcctcctaagatgacactgtcggggaagaaaaaagtcatgtcttttcctcatccattacaaggctcatggctgacactcctgtaacaacagtcagagtaatcagagaaaagcgtaacagacttatttgtcaaagttttttgtgacatgggagccttcagaaatgaagatccaaagacccagggaaaaccgtatgtatttttatgccaatgaagaacggacagtcatgcaaaaatgtgattggaagaaaagggggtaatttatcaagcatggggaattcagcaagacctgtctgttgtgactctgggcctctttgtgcagccttccttcccgctgggtgtggggcaggaccactgtggaacgcaggtcttacggcctcctctcagggaaggaaggtcagtgagcaccttcatgactgtgcttcccactgaaaggtagggaggatcagagcaaccctcttgcttctgaggccttctcagtctccttcagttcacagtgctcagggtcatattttctgagccatgacaacatttaaactgagacctaaacaggcagtcaaccaagaggagatctggggaaggaacgttccaggcaccagaatttgataagaaggcctgtagggggagtgggagggatgctcggtgtgaccagtgcctgggaaatgcatgacaaagtcatctaagagatctaagaggcagcaggagccagatcacacaggcctttgtgagcagggtcctagggcattggattgtagccaccaggaaacatttccatgggaggagtttaagcaagggacatacatgacacaaatttttagaatgtgtgattaccatactacttaaaagccatagaatcccattctcaaagttaaaaattgagtaaaatctctagccaggcacggtggcatgcacctgtattcccagctactcaagaggctgaggcaggaggatcacctgagtccaggagtttgaggctgcagtgagccgtgattacagcgtgtgaacagacactgcactccagcctgggcaacatagcaagacctggtttctaaaaataaagaaaaagttaagtgaaacctcaatactgtatataaaaatacacaaaatatttattagtatgaatttatgatatgtgttcaaattaagacatttattgttctaaagtcaattggcgttagcaatgagttgatttttcaaaacgacaaaaattagaagtgagtgttatggaagacagtttgctttatatcatctctatatctagtttacttttgttttgttttgggttgtgttgagaaaagccttgagggataaagattagttgccaagtttgtgttttcatactttgccttgtgacctcagactttctcatttttgttcttgattatatttaactgttgcttaagtatacaagtcatacaaagaaggaaccaacagtttgtgtacacactgtctctgaaatcaaaatagcatcatgtgataattgatctcttgttatgtgactgacataatataacagtcacatgttccacacagacaggaacatggatcaggtaatgcactttgtgagaataggctaattgccagtattattttatgtgaatggacacgtaagaatgcttgtttgaaaaatagcaatatgtaattacaattactaattactaatcagtgacctatttgtaaaatcaaaaataagaacttttatttaatctgagatcctgacagaagcaagttaacttgaaaatatctctggatttcaatatattaagattttatatgtattatatgaaacaattcgtatgttcttatactaattaaatattttttaaaaatattcaatgtataaaaaatgcaatttaaaaatgagtggctgaaagaatagtaaacagcactgtaatcctaaaagcttgtgttaactttacatttcaatttagtcacaaaatacagatggatacattcctgaaaaaatgtgaagtctttagtaagaatagacatttttgagagagtaaggcacatttaattatttaatattatacatttagtttaggaacataaaatgaataatttaaaattttaatgattttaaaggtataatttaagagttgtacatgtgctcactgaatttactgataaatacaacttttcattactagtggaatcaaaaatttttagttctcccatatctatttttttggccagttcatcagaaatactcaaagattttagatgggagaaattttagattcttaagctatttctagaatgatggtggttttgtttctcaaagcattgatctgttgcccagaccttttgcccttcttgctctgtctcacctattcagaaagcacttgctctttaaaaaagaactgaggacaggaactggctgaatacacttttgtcatatggaactttgggcttattgtctaagctatcatcttttcaccatcctcacaaatctgttgaaaactgaagactcgcctgtgacaaattccttttgcatgttcccaatttatgcacagtgcttttcacatgacgcagaagattgcagacacgaaagcactcaaaagcaaagagacaccggggctgggtggggcacaagcttgctgccatgttgccggacaaattggttgtattctgtgatcaaacatctaaagatattctgtacactggagcatttgagacacagtgacatttcaaagtgaaatccaagtgagcttttttatttgataacccagagaaatgcagtggccacacatttctgctccattttggcctctgcttcttggacccataaactatgtgattgcaatgcagccagctggagataacatttctgctgtggcgtcaaggtttttcactttagtttctttggtatttggaaatgaaaatacacctatgccctcaaaaacaatttattaatctttgtaactgtactgttttgcaaaaaatgtctacaaagtgcaccatttgattccagataaataaatttctttatatggatcttcaggcaattcttccattaggcatagcagacatcctcatctatgtgcctcagattctctgttctttttgttccatataggatgtctttttcttcctttttatgtaatattctcaaaggatataaccacatcattccatcaagtttacttcatggtttgtgtcaatgcattattcttgcatttgcttctttctggaacacagcagtttataccatgtttaggttttatgttttctgacttttgttcttttgtagctctgttggagtgagtccaacttatgacatcattagcaatgttttgtaggctctgggatgcaccttctgtgtgtctgctttgattttctgtgctgccttcatgatagtgtccacagaaaataattttacattcctaaaactgatatatattcagcaacatttttcatttacttacaccatgaagaacaacaacaaaagaaaatgaagtaacaacagcaagtgaaaaatcagataatagagctagcagtaaagtctgtaatttgttctcccaaaactttgttcacccaactgagaggagcacagaacataatgcacctggttttgtcttctacaaaccattaaccattgacattctaatccttaaaaaaaaattgcacataatacctgctgagcaagtagcattataagtttttaaaaatgcctgtgagtaggcatatcctgttgtagagaattatgttctaaaagtacatttcctttatagaaccttggtgagttttctccctaatcttcaggggtcaacttggataaaactagggtttctgagaactttccaggcatggttcctttcttgtagttgtgaacttaaaggtgtaaatattgtcatcctttatggagatgtgaatccaggcaaaagcatgtatcaaacccttgcgatttgccagaggtcaagctgagcattgaagaaacagagaaacagtaaggtaatgatgacaaatagtagacagagaatgggaacacaatgtgaaaaacattttaataaagtgatgagtgacattccagagtgcccaaggaaaattagaattcccaagcaggtagtgaagcaggggacgagaatgacacagctgatataaaaagttatctggagcctgggtgcagtggctcacacctatcatccaagcactttgggaggccgaggcaggagaaagacttgaggccaggagttcaagaccagcctaggcaacataacgagacccccgtcactacaaaagttttaaaaaaaattagccaggtgtggtggtgcgtgcatgtggtcccagctacttaagaggctgaggcatggggatcgtttgagcccaggagttccaggctgcagtgagctgtgatcgcaccactgcactccagcctgggtgacagagcaagaaaccgtctcaaaaaaaaaaagttatccaggagtaatgaaaagtttggtgtgatgggagctgagagtccagaaaggtgctaagagggtaggttggagctgggcccagtggctcatgcctgtaattccagcactttgggagatgaaggcaggtggatcgcttgaggtcaggagttcgagaccagcctggccaacgtggtgaaaccccacctctactaaaaatacaaaaattagccaagtgtggtggtgcacacctgtaatcccagctacttgggaggctaaggcacgagaatcgcttgatcccgggaggtagaggttgcagtaaaccaagattgtgtcctctagccttgccgacagagtgagactttgtctcaaaaaaaaaaaacaaacaaaaacaacaaacaaaaacgaaacaaaacaaaaaaacaaagaggttaggttggataagtaagtgaaggccaaatcataagacctgtgatgaagttggggctgtattctgtaagccacgaagagtcatcaaaagcctcacttgtgagaactagttattgaatgagatcctgtgagtagagaatttatcaagatctcggcagcatgaccacgcagaaacaaacagaaacaaaggaatgtgtcaccaggattcctctctcatgcagggctgtgttaggacacacatacttcatttgagattgtttggaaagtcacctctcacccccactctagaacaacttacattagagaaacgttttcttacagtggcctcacacacacccttttgaggagaaatgaaaagctgtagtttaacaaccgccttacacgtaagaacgaaggaaccaaatgtgcaaatttagaatgacattgcattgggctgaccataaagtaccctccatccccagggcactgctaatgcggagaacgtggtttgtcatacaagacctactgggtagctgtttatttagtagaaatagtgtatgctggttacaagaatggaaaagagaatagaactaaaattactattatcaactacatccaaaaagcacacaaaaaaataaccactaggtgtatatctcaaggtcagaaggccaaaattaaatagccaagttctttctttcttcttcatatcctttcagttcattctctctgctgtcaccccacgcatatactcatggttccttaaagtctttccttgggccagtggttcttaaagaactcttatgtcagtagaagatgctttcagttgccgataccagagacctcacttcaaactgatcttcaggattagagaagcacctagcttgtttaatttgaacgtcccgctggggggcagtcatggtcgatcaatccccagccagaatgtcatcagagacccaccagtctctttccatcttttcactttgcccccagtgctttatactgagtcgggcccatggcccctgtggaaataacagggaggtgacccaaagtaatggggactatgggcatccttgttcaccagtggagagggtgtgtttgcccttgacaaccaattgaccgaagttactgttcaccatgctggaaccaccctgagccaatccctacagtccaggaaataccatggtgggttggtttagacttggattaccaaaacctgtccatgtaggaagattggggtgggggtatcactgtgactatccatgctcttcagcagtgagggaagaaatggatgttggagagaatattcacatgtctccttcaggcctctgagaatttcatgaaagccacgtgctatatccctgtgtgttaattttgcattcagtttttggaggattcactaacccactgaggactgtcattctttttttttctcttcagcttcattgaggtataattgacaaataaaaattgtatgtattcaaggtgtacaacagatggtttgatagacgtatagattgggagatgattgccacaatcaagctaaatacatatccatcacttcacagttacccttgtgtgtgtggtgagaacactgaagatctactctcagcacatttcaagtatacaatacattattattaactataatcatcatgctatacattagctctccagaacttactcatcttaaaactgaaaggttatacctttggctaacttcttactatttttctcacttcttgaccccgggtaaccacccttcttctctttgtttgtgagtttgactttttatggatttcacatacaagtcagatcatgcagtgtttgtctttctgtgcctggcttatttcacctaatgtgaagtcttccaggttcgtccatgttgtcaccaatggcaagatttcctgttttatggctgaatagtattccattgtgtatatgtaccacattttctttattcattcctctgttgatggacacgtaggttgattccatatcttggttattgtaaataatgctgcagtgaacatggcaatgcggatgtctcttcaacatactgatgttgtcccctctggatgtatatacccgggactaggattgctgagtcatatgcttattctctatttttgaattttttgaggaacctccatactgttttccataatggctacaccattttacatttccaccaatactgtaaagaataaggaccattctttaccttagaaaaataacattgcttcccagaggcagaagtgcaccttattcctagatttcagcactctctgtactgtttatccattcaggaggaactacagtgatcaaacactggagataaatagtggttttaagcttttatttcataatttttacagatgatctagagataggccaagtaataatatgtaaataattaattttaaacattcagctcattctttaaaaaactcatagcccaaatgtttgttggttgtttttttccactgggaaaggacggggaaatgtagtttcccactcctgcgccctgtatgttgttatattttaccatgtctttcatagcagcctcccatcattggttgccgtaaatcttttcactgactgtgaggtaccaagagtaaggtaatttagccaaattagtcaggacagcctcactttgtggagcccaggtgaggcttttcaataagagctgttcttccaactggaaaatgccaacaagcaacaatgcagccagtcatcttattttgaagttttaaaagaaagggtttgccagaaatactgggaaggtttagcagctgttccacctggaagatggcaaggttcttgacctgtgaaggaccatttggcattgtctgtccatgtgctgatcagttttaagtaaaccctgcactgaagcaatgaagaaagacactggcaaagtcagcatgctgttgcctcactccccgtcaccactgtgaagcctcctcttttaacataaggcccagagaggatccaagatgttgccaagaccacctgtagccaccagccatgcaggggtggggtcatgtttcttaacccacagcaacacaggtgataggcctggttcttgatctggacagccttcgcataacaccagataactgaatgctaattttcctttccatttaccttaaatcttaacagtaacacaactaacaataaaaaaggcaccatgggatgtgtcctgcttgttccacaaagaactttttcccaggtgtggcctcccttgaaaaatggctgcacccttggatttcttcgtgtggctgatttgcagatccattagttacattcacctttggctaaaggctatgggatagttgatttactttggatgatgcagtatttttcaagagaagttttcatatatttagcccaactgcttcgccacaagaaacaaagtcgtaagtatctatacaggtttacagaaaatgaaattttagctccagctacaaagcggctcagccagttcatggagacttgtcacaggttggtgactgagaagggtccacctgaaacacttgcatgtccaggtccagctgagcgtgcatgccagcctcagccgctggggtccctgtctggtcctgcagcatcacgtggctcagatggcatcttcgctgtgagtgcgaagacgctgggcaccagcacctgcacaggcagatggtgaaaggcccccaactctctggtaatgaggatggcagccatatgctttctcatgcatccagctcagcctccaacctacaataccataatgatgacatgtgggaaagtctaggtcccatgccacatcccagttaaaatgcatgcactggaaaagggaggggaactcagctgcacacacattactttttttctatggccttttctgcatctacccaggacttaattgctaatactgcctccctccatgtgggatgaagtgggagaaggatcacaggaaaatacttccacccgtttgctgtggcagggctagattccaaagtgcccaggactgctaattcattcacccctttgtgacagcttatttacccacaccccaccttatttccaaaaggactccaagtagctcaagaaaggaataaagagctatagttaaaaaataatttctcaaagtcctctgcctgtctccatgggctgggctgaactttgagtgactcacccaccgtctgaagtccaagaaacaaataccctaggctgagatctggagattgttctatttgcaattcttatggagggagttattatattctccactgattgggcagtgtgttttcccagagagacagcatgaagcaggcacctgcatccactttattcttttcctctttgtgagtcttgcacgggccgtcagcctgtttgtgaactctggcaggacatggaggtcagcctgtgccaagcaccttgaaccctcattatctttaattagtgtttaggaggttaatcggtggtgaagctcatctttctttaattacttcaacaattcagtcagggggtccctgcagccagctttgaattattctgtttgtttggatgcttatttgaatttgtaaagttggatgtttattgtccagacctagaccctgtgtgcattgaagaaagtgttagggaaagaggagagacgagtatggggaaggttatttttattgcaattaatttgcagctgaatgagcccagaaagtttgcagttttaaaagtgcatcacagtcatatcagagatatcaatgattcaaactggatccaaatcttcctaagctccaattagcacatttattttatttttcatacaaggataagttcacattcaaataattagttgattaaaaaatattattaggtctctactccatgtcttgacatcttaggtgctttgtccagtcacatttaattttcagtattgtacatgataaagctaccaactttgggaaattatattccagcccaaagccttgcttcagaaactctccttaatgcctggctgacatttccttttctttttttctagcaccttatgctcattctctcctctatttattttcagtgaccaccagacactttaaagttgatctatatttacctttttataaggatccttcccaccctccatttctttccttcctcctcacttccacctacttgttccttcaacgtggccattgttctcatgcttcccggaagggtgaactttggctaaagtcatgatttccactcaacaggacagtaactctcagccacattgtgcctctgtctgcaaagtatccactgttctttggcaaagttaggatgtagccttggtaatcctttggccctggagattgtgtttttaacaaagcacctcccttagagcgggttttagaaagtcagcaggccagcgcctcccttccccttccaggaagaagcagaatctcagacatggtttcagggaggtgctcccaggagcctctggcaggagaaaggccttgtggccttgccatttccatctttgtctttgcgtttatacgttggcccagcctacattgactctttcatcgcttcacttcttcagtccttcaacaaatagtttttgagcatccactgtgcaccaggcactgttttgggtgccaagcatgtaactgtaaaaaaaaaaaaaaaaaaaaaagcaaaattcctgccctcatagaacttacattctaatgaggaacacagacagtacacacaaactatgtcgtgaaaagtgtggcatggaaaaccaagctagatgtgggtgcagacagtgatgaggggagggtttctgggaagctggtctgggaagtctggtctgagtgaactgagggagagagacttgtccacgggaagaacatcccaggccaagggaaagcatatgcaaaggccctgaggtgggaaaccagagtgatccaggaacttgcaaggatggccatgtggccagctggggcagagggagggagggaagcacagtaggaaatagcgttgagaggaagccagggtccttgcgtttattgtatgattctgagtaggtaagcagcatggtcctgtttgtggatatagaattttaacagaactttctgcttataaagctgcatctttgtgattaacttagagcttcactgctatagtatgttttctccatttcccaaatgcccctatttgtaaatgcacagagcctagactattcttcacttgcttggtgacacccaggccttttcaacccgtggcacggcattttgcttggggtctctccaggtcagccaggtgccctgctaatttatctgttcctagcagccccgtgactccaacctgaccttttcataggcttgccgacaggaccacggagctcagccttgcaagtcgtggaatgaggtgatggtttccatatgtgctggggctgtcattcaaattctttgcctgctcagctaatgaggtcagaacggctctgcctgaggtggacagcctctccctcgggtagtgtgcctgcaggagatacgggaggaagtctccccacccgctttaaaggaagcttggcgagatagcattgcttagcactgttcacaaaaggataactgcagaaaaacatgaaataaaagggaatagaagggaagagacagactgacttttttaatttaaactttttatttggagataattgtggcttcataggcagttgtaaaaaataatagaaagctcgcatataccctttactcagtttccttaaatggtaacatcttacaaaactgtagtacagtatcacaaccaggaaactgacactgacacagtcaacacaaaacatacccatcaccacaaggaccacttcctccctaccctttccatcccgccattgtgcttttataggtacccctactttctattcattccttaactcctggcaaccattaactgttctccatttctatgattttgtcgtttcaagaatggcatatacatggaatcttataacgtgtaaccttttgttagtgacattttctttcagcataattctctggagtttcatccaggttgttgcatgtgtccatagtttcctcctgtttactgctgagtaatattccacccaatgcatgtaccacgcgttgcttgaccattcatccgttgaaggagatctggatttccagtttttgctcttatacataaaactcttacaaacatttgtttactggcttttatgtcaatattaggtcttaatttttctgggataaatgtccaggagtgcaatagctgggtttatagtagatgcatatttagttttacttttaggttttttttttttttttcaataacaaccatgtatttagctcatgattctgtgggttgacagtttgggctgcacattagtggagggttacctgatttgtgtgtgtgtgagacataattcaaacacataaacttcaccattttaaagtgtataattcagtggtttttagtattttcacaaggttgtggtatgtttggtttttaaacaaactgccaagctgtttttcagagtgggcataccattttacattttcatcatgatgcatgagtgatctagtttttctatatccttgccagcattcagtgctgtcctttttttttttttttttttaattttagccatagggattgctgcttagtgatctctctttgtggttttagtactgtgttttcctaatggttaatgatgtgaacatcttttcatgtgtttatttgccaactatagtcactctggtgaaacgtcttttcatggcctttgcccattttctaatggggattctttgttttgttttatattgagttttgagagttatttatatgttctagatgttagttctttgtgagacatgtggcttacaaatattttctcccattctgtaccatgttctttcagcctcctaatagggcctttcatagaagaaaagttaattttagtgaagtccaaatatcaatttttctttgtgaattatgcttttggtgtcaagtctaagagaactctgcttagccctagatttcaaagatactctcctatttttttcctaaaagttgtatagtttttttttgtttgtttttttaattatactttaagttttagggtacatgtgcacattgtgcaggttagttacatatgtatacatgtgccatgctggtgcgctgcacccactaactcgtcatctagcattaggtatatctcccaatgctatccctccccccttcccccaccccaccacagtccccagagtgtgatattccccttcctgtgtccatgtgatctcattgttcaattccccacctatgagtgagaatatgcggtgtttggttttttgttcttgcgatagtttactgagaatgatgatttccaatttcatccatgtccctacaaaggacatgaactcatcattttttatggctgcatagtattccatggtgtatatgtcccacattttcttaatccagtctatcattgttggacatttgggttggttccaagtctttgctattgtgaataatgcctcaataaacatacgtgtgcatgtgtctttatagcagcatgatttatagtcatttgggtatatacccagtaatgggatggctgggtcaaatggtatttctagttctagatccctgaggaatcgccacactgctatgacaaacccacagccaatatcatactgaatgggcaaaaactggaagcattccctttgaaaactggcacaagacagggttgccctctctcaccactcctattcaacatagtgttggaagttctggccagggcaattaggcaggagaaggaaataaagggtattcaattaggaaaagaggaagtcaaattgtctctgtttgcaaaagttgtatagttttatattttactttcaagtatgtatgctgagttaatttttgtgtaaggtatgagatttagatcaaagttctttttttctgtgcatatatagttgttccagcaccatttgtcaaaaaggctttcttccactgaattgcttttgcacctttgtcaaaaatcagatgggtatgtttatgtgagcctgttttttgtttctgtcttctagtctatttatctgtttatttctttatgaatgccacactgtcttgattattgtaattatatcataagtcttgaaatcagatacactgatttcttccatttcattcttcttttccaaaattttaacaattgttcttttacctttccgtatatactttttggaatggtctcatctgtaacgacaaaaaatggttgagattttgacaggaattgctttaaatctgtatatcaatttggagaattaacgtctttactatgctgtgttttccaatccatgaaaatggtaagtctctccatttgtttagattttctttgatttctttcatcagcattgtgtagcttttagcacacaagttttgtaaatgttttgctctgtttgcgcctcagtatttcatatatttttgaacgatcccaaattgcattgtattttaaattttagcatctgtgtgttcattgataatacatagaaatacaactgatttttgtatgttgatcttacatcatgtactttgatgaactgacttattagtactaggagttttatatctatacataaatatatatatatacatatttatgtgtgcatatatatgtatttcttgggattttccagacaattatgtcatctgcaaatagctacaattttattacttcctttctggtccctgtattttttatttccttttcttgtgttattgcactagctagaacttctagcacagtgttgaataaaagtggtgaaaatggtcatccttgccttgttcccaatatttgggagaaatcattcaactttttatcataaagtgtggtgctagctgcaggtgtttttgtagatgctctttgtcaagttgggggagttcttttcttaatttgctaagagattttttgtttgtttttaactcatgaatgggtgttgaattttgtaaaatgctttatctgcatgaaccaatatgagtgtgttttttttctctttagcctgttaacatggtagattacattgatttctgaatattgaaccatccttgtatctctgtaatctccacttgattgtgttgtgtaattcttgttatatgttgatgaattgcacttactaatgtcaggtttttttgcatctatgtttgtaaggtacattggactggggctttctttttttgtaatgtctttgtatggactggtatagtataatagtagcttcataaataaattgggaagtgtcttttccttttctgttttctggaagagattatgtagaactggtggtaagtcttctttaaacttttggtaaaattctccagtgaggccatataaattcaatttccttaatatttagagagctattaaaattatttcaaattgtgtgaattttggtagtctttgtttttcaaggaattggtccatttcatctggtttgtcaaacacatgtgtagaattgtttctggtatcctacaattatctttttgatatttgcaaggtttgagtaatatctcacttaattcctaatattggtaatgtgtgtcttctcttttttttttctttgtaagtattgctagaagtttgttaattttattgttcttttcaaataagaagctcaataaagagcttttttattgtttctctgtttttaacctatcagtttttattcttaatgatttccttccttctgcttgctttgggtttattttgctcttcttttctagtttcttcatgtgagaacttggaattctttaattttttttaatatatagattaactgctatgaatttccctcacagcactgttttaaccgtgtaccacaaattgtaatgtattttctttttcatttaattcagtaattttttatttgtcttaaggctttttcttaatcctttattatttggaagtgtgttattaatttccaagtgtttgaagatttttctgttatcttttttatttatttctagtttgattccattgtgtttgtagcatgtattgtgtataacttttaagtgtgttgaagtttgttttgtggcccagaatattctatttcttgttatatattccatgtgcacatggaaagaatgtgcattctgttgttattaggtagagtgtggcatgaatatatcctgttggttgatggcgtttggcagttctttaaattttattgatgattttccatttgtactatccattgttgaatgagggatattgaaaaattcaactataattgtgaattagtctatttcttctttcagttctatcagttttagcttcacatattttgcagctctgttacttggtgcatagacattcaggattgctatgtattctgaatggattgatccttttgtcattgcataatgtccttcattttctccagtaagttactttgctctaaagaccactttatctaatattaatatagttacttaggttttattttgattaatgtttgcatgatgtatcttttccatcattttctatctgcctatatcattatatttgaagctagcttctaaaaggcagtatgtaattggctcatgtttttaaattcaccatgtcattctgtatcttttaattggcatatttataccatttatatttaatttattgctgatatgttggggcatatgtctgccattttacctttttgagccatcacacctagctctacatacatttaaaaccatatcagaccatgtataattttcactttaactcatcaaacataatttggagaaatcaagagcaaaagaaaagcttcttgtatttactcatattttgcttactatattctttcttttttatgttccaagatttcttcttttatcatttcctttttgtttatagaactttcttattattattttttattttttgagatggagtcttactctgttgcccaggctagagtgtggcggtgtgatctcagctcactgcaacctccgcactctggcgttcaagcaattctcctgcctcagcctcctaagtagctggtattacaggtgtgcaccaccatgcctggctaatttttttttgagacggagtctcactctgttgcccaggctggagtgcagtggcacaatctcagctcaccgcaacctctacctcctgggttcaagcatttcttctgcctcagcctcccaagtagctgggattataggcacctgccaacacacctggctaatttttgtatttttagtagagacaaggtttcaccacattagccaggctggtctcgaactcctgacctcagatgatcctcccacctcggcctcccaaaatgctgggattacaggcgtgagccaccatgcccagcccatctttgtatttttagtagagacagggtttcaccatgttggccagactgttcttgaactcctgacctcaagtgatcctcttgccttggcctcccaaagtgctgtgattacaggtgtgagccaccgtgcccccaccttataggactttctttagctattcctgtaagatcgttctggtggtgacaaattttcttagttttccttccattcaagagatttctttttcattcctgaaagatattttcactgggttgacagttctgttctttcagcacctgaaaaatgttgtgccagttgctctggcctcagtggtttctgatgagaaatccactgtcaacctacgtggttttcctctattggtgtcatttctctttggctgcctttggaatctttgtcgttggtttttggcagtgtaattaaaatctgtcttgttgtggatttctttgagtttatcctctttagaattgctctgtaagtttatattgttcatcaaaattgggacattttcagccactatttctgagtgctcttttagccctgccgtatttctcctctttttctgagactctgaagacgtgaatgttagatcttctattatattcttacaggctcccaaggctctgttaatttttatagtctattttgtctctattactcagactgggtaatttctactgttctatttttcagttcactaacgatttcctctgtcccctgcattctgctgttgagcccatccactgaggtttttatttcagttgttatatttttccgttctgaaatttcctatttgttcttttaagtcttatatttcttggctgcggctttctattttttttcttttaagtgtgttcataattacttattgaaacatttttaccatggctactttaaaatctttgtcagacaattccactgtttctgacgtcttggtgttagcatctattgatcatttttatttttctccctgtttgagatcttcctggtttatggtaaaataagtgattttcaaatgaaacctggacattttggctattatgctatggactctggatttcatggcagcctggctcctgccgggtagaggtaatccagattcactaatggcctctgtttatgtcttcagggtagggatgggagctcctgctctccaggtgcaggggtcctgattctccataagaccttttctgacatcacccagtgaagagggaaaaggatgccttcacatttcactgggttggggatggaagtctagtcatccgaagtgatctctgctgacatcccagaagggaggggtccttattggctggcagggatgaaagtcaaggatccctgcttggtcttctttttcacctccccataagggtgttggagagcctcataacagtctcctaagggaagaagtctaagagcaccactaggtctttgctggcatgggttgggggtgagggggccacctttttctctggggtatctggctgcagatgagtacttcaggcctgaaagttttctgtcttgctaggctgcccctttcctgttcctttgtctggagagaaaaggcatttgctaggtaggcttctttgttcatgcctgtggacattcagaatcgtcctctgcctctactgggaaaaccttgtctgggacagaggaaatcaagcactgtgctgctacaagcctctcttctctccagtgcccagtttttattattagaggaaagttgggtccagggaggactggaggaatctgttgtttatttttggaacggaatttgtattagggttagttaaccttgaaccctatggtgtcttcagccagaatgtcccccaaactgtcccatgtaacctgaattcttaaaaaattacaatgtttcatctctataaatccacaaacactgctcacaatatcttctggaatttggagtgagcttttctctccggaagagaatagggacaatgtccatattctggcattttaaaagaataatacagaggaatttaccttggccactattggaaaacctactgtgtcctgagctcaatgctgggcgttatggatagacacgagacaaatggtgaaggattgagttgtggagacacaacataagaagagagtcgcaccacaaatcagttaatacaaagcacacatgcaattttacatattgaaccgtgtcctctgttttcagcccaggataggtactgtgaaaaacataacaaaaagtgtaagacttggttccggctgaatgaaccctctagttgaacacacagatggtgtgctggtgttttccagggatcactaggcacagtgctgcttctcagtctaccagctctccatgggtttctacaagctgagtccaaagttgcatctcagctttgacctctctctggtcccctgtcttctgaacacctcagaggcgctcacaggccccacatctgaaactggattcattgctgttcctgctgaacctttttctcctcctgtgtttgcatctggatggtcagcaaagggccatccattgttcaggacccagcttcagtgctgattctctctgccctgctccaagttcttcactcctccacgtcacctctcctgagcctagcacaatctctgtaagggcatcatcaccttatagcatggtaagtgtctgcacggcgaggtcaccttaaagactgtgagttcatgagggcagaggctgtgtcttgggtaactttgtttccaacattgggtctcacacacagtaggcgcagtacaaatgctgaattaatgggaggtcaagaggtcatgtttttaaaaagaagatgcatatggattggcagaaaggggaaaggagaatcatctactaccatctaacagaatggaatttctggagggctcgtagttccgtggtatataaaataaatataactcttattgaagttttaggctggaaaaccgattttgtttttgttttattcttgtgattttccttcattacataagtgtctttaactaaggtaaagttttagataaaacaaaggcctaggtaggtctggaatacacttgagccccgaaggttttcatttcctaatgataatgagtaaaataagttgccaattgtggctatgaaatatcattctctaataaaacaggttagaatgttaacagcctggtggattggtagatgtttggccttccctgaaggacagggaactggggaccagctttttttcttgagggcctgtcacatctgtgttttgcagactgcccagtagctaatttaaaaataagtttctaaaattacctacttgtttttggctttgttgtagtgtcagctgtgattccggtcagttgtaactattgacaagatctaaaattcagatttggagttatttgctgtgtactccacactcccgctctttggcagttatgcatgtgtgatttttgcaggaatagctttctaacagaaatgtggacacaagagtttatttttctccatcataactcagctctccacttcttcctgagactgatcattttttgaggcaggagcataacaccttctctaggatttgtcagcttctaaaaagagccttttgtaaggacttgtatgagcttgggtttcaccatcattactggggaggcactaagactgcacatatctctgggtgaagtaatgtctacacaacacctttcatagcaatagttcccagctagcatacctgcttctgccagtacagagccaaaaaaaaaaaaaaaaaaaaaattaagtactttaatgccaataccccccaccatgggaaaaataaactgtaaaaatggcatcattaccaacagctcatgtgataggagggaactgaccttgatttggcacccaatccacctttttttaattcaattttctttctcaaaaaaatgtgataaaatgcacatagcataacatttactattttatagtttgccatacatggcagttggtagagtcacagtgttgtataaccattaccactacctagttccagaatattttcatctccccaaaagggaaccccatatgtgtgacgcagtccttcccacttcctttcccccacctccctgccctacagcccctggcaaacacgagcctgttttcagtctttacatatttgcctattttggacatttcatataatcatgtaatacacagcctttgaggttgggcttctttcacttagcataatattttcagtctttatccctgaagtatgtatccatctgtaccatatttctttatatggctgaataattctccattgtatgcatagaccacatttgcttacacatttgtcagttggtggacatttgggtcatttctacttttggcttttgtgaataacgcagctagggatattgtactggtatctgtctgagtccattttccattcatttgggtatattcttaggaatggaattggtgagtgatgagataattctgtgtctaacttaccaaggaacagtggctgcaccattttacatctcaccaagtaatgtgcaagagttccagtttctccatatcctctccaacacttattttctgagttattttggttttggggtttttttaatagccatcctagtatgtgtgaagtgctatctcatggtagttttgatttgcatttccctaatgactaatgatactgattatcttcatgtgctttttggctattgtgtattttctttgaataagggtctattgaagtcctttgcccattttttaatcaagttgtttgtttttttgcttttgagttgtaggtgttctttatatattctggatactagacctttatcagatatgatttgcaaatattttctcccattttgtagttgtcttttcatttccttgataatgacctttgatgcacaaaagtttttaatttccatgaagtcccatttatctgtcttttattttgttacttgcatttggccattgccaaagccaaggtcataaagatttgcccctgtattttcctctaagatttatattgttctagctcttatatttatgctttttattaatattaattaacaaactgtaatttataagcctctggggtacaaagttatgttttgatacagctatacaatgtgaaatgattaaatcaagctaattaacattgtcatcacctcaccaacttatcattttttgtgatgagacatttgaaatttactcttagttattctgaagtatataacacattattattgactatagttaccctgttgtgcaatagatcttaaaacttactccttttgatgagttcatgtccttcatagcaacatggatgaagctggaaaccatcattctgagaaaactatcacaaggacagaaaaccaaacaccacatgttctcactcataggtgggaactgaacagtgagaacacttggacacggtgggggaacatcacacaccagggcctgtcgtggggtggggggatggggggagggatagcatcaggaaaaatacctaatgtaaatgacaagttaatgggtgcagcaaaccaacacggcacatgtatacatatgtaacaaacctgcaggctgtgcacatgtaccctagaacttaaagtattaaaaaaaaaaaaaaaactcactccttttgtctaattgaaattttgtaccctttgaccaacagctcgtcattccctcactcctccactctcaaccccagcctctggtaaccatcattgtactttctacttctatgagttcaactttttaagattccatatataaatgagatcatgcagcacttgtcttactgtgcccggtttatttcatttagcatagtgtcctcttggtttatccatgttatagcaaacgataggatgtcctttttaaggctgaatagtattccactgtgtgtgtgtgtgtgtgtgtgtgtgtgtgtgtgtgtgtgtgtgtatgtaccacagtttcttcatccactcattcattgatggacacctaggttgatttcctatcatggctattatgaataatgctggagtgaacagaggagtgcagatatcccttcagcatactgatttccactcctttggattatatacccagaagtgagattgctggatcatatgatagttctatttttaattttttggaggaacttccactgttttccatagtagctatactaatttgtattcccatcaacagtgtacaggggttcctttttctctgcattctcaccaatacttgttagctttctttttttttttttaataatagccattctaacagatgtgaggtaatatctcattgtgattttaactggcctttctctgatggttagttgtttgatcattcttcatatacctgttggtcatatgtatatcgtcttttaagaaatgtctattcaggtcctttgttctttttttttaattgagctatgctttcttgatattgtttgtgttccttgtgtattttggatattaacctcttatcagatgtatagcttgcaaatattttctctcactctttaggttgtctcttcactctgttgattgtttcctttgctgtgcagaagctctattgtttgatgtcatcccatttgtctatttttgcttttgctgcctgtgctttcagagttatattcaaaaaattactgtccagaccagtgtcatagacctttcccctatcttcctccagcagttttagtttcaacttgtatatataagtctttaattcattttgagttgtttttgtatatggtgtgagataagggtcaagtttcattcttctgcatgtgaatatccagtttgccaccaccatttattaaagatgctgctttttcttcattgtgtgttattagcacctttgttgaaaatcagttgaccataaatgtatgggtttatttctggcagtctagcctgttccgttggtcaatgcatctgtttttatgccagtaccatgccattttatttgcaatagctttataacatattttgaacacagggagtgtgatgccttcagcctttttcttagtgctcaagattgttttggctattgagggtcttttgtggttccatataatcttaaggattatctttttctctttctgtgaaaaatgacattgccattttgatagggattgcattgaatctgtagatcactttgtgtagtatgattattttaacaatagtgttgttttacagttcatgagcatagcatcccatttacttgtattttctgcaattatttcatcagtgttttgtagttttctctatatagtcttttaccccttgattaaatttacacttaagtattttgtgttgttgttgtgcttgtaaatggaattgctttcttaatttcatttttggatagttcattattaatatataaaaacactactcatttctgtatgttgatcttgtatcctgcaaccttactaaatttactagttctaaacagttttttggtggagtctttaggattttctatacatagcattatgtgtaccaacaaacagagataattttgcttttttctttcctatcaggataccttatattaccctcttgcctaatggctctggctgggactttcagttctatgttgaaaagaattggcaagagtgggcatccttgtcttgtttctaaccttagaggaaaagctttcaacttctcaccattgagtatgatgttagctatgggtttgtcatatatcctttattgtgttgagatatattccctctataactaatctgttgagttttatcatgaagaggtgttgattggcttttctgcatctattgagatgatcatatggtttttatatttcattttgttaatgtagtgtttatagatttgtgtatattgaaccatccttgtatcccaggcacaaatcccacatgaccatggtgaatgattctttcaatgtgttgttaagttcagtttgctaatattttgttgaggatttttgtatatatagtcatcagggatattagcctgtaatttttttttcttgtgattccttgtctggctttggtatcagggtaatgctgactttgtaaaatgggtttggaagtatcccttccacttcagtattttggaaaagtttgagaattggtattagttctttaagtgtttggtagaattcagaagagcagccatcaggtcttggccttttctttgatgggagattttttactagagatccaatctccttccttgttattggtcagttgtgataggttgtaagtgtctaggaacttaacatttcttctagattatccaatttgttgccatatgattgtttgtagtaatatctaatgaccctttacgtttctgtggtatctgttatagtgtctcaactttcaattctcactttatttgcgtctctcctttttttcctagtcagtctagctaggagtttgtagatcttatctttggaaaaaaacaacttttagtttcactgatatttttccattgtttttgtagtctctgtttcatttatttctgctctgatcttttttgtttccttccttctgccaactttaggcttagtttgttcttccttttgtagttcctcaaagtgtaacattaggttgtttatttcttctcttttgatatagacatttatttctataagttcccttcttaagattgcttttgctgcaacccataaatttagatatgctgtgtttccattttcatttgtttcaaatatatttgtatctttgatccattttaagttaatttttgtatgtggtgggaagggcccaattccattgtttggcatgtagaaatctagttgtcccagcaccatttgctggagagattattcttttattattgaatggtcttcacatccatgtcaaaaattaagtgaccattgatgtatgggtttatttctggactctcaattatattctcttgatttgtaagtctatgtcagtaccatgctatttttattactgtagtttagtaataagttttgaaataggtatgtgtgagttctatgactttgttcttttttcaacattattttggttattttgggtcccttataattccatgtgaatcttaagatcagcttttctatctttgcaaacaaacaaacaaaaaaaaccattgggattttgataggagttacactgaatctgtaaaacactttgactagtattgctatcttaacagtatcatctttcaatctgtgaacacagggtatttttcaatttatttgggatgtctttaatgttttcagaagtgttttatagtttttttatgtatgagtgtggcacctctttggttaaaattattcccgagtattttattccttttgattataaattggattgttttcttaattttcttatcagattgtacattgctattatatttgtatactactgatttttattggttcacctggtatcctgcaactttactgagtttattaactcccgtaatttgaatatgtgtgtttgtgtatattcttcatcatataagatcatgtcatgtacaaatagagatagttttacttctttctttcatatttggatgtattttatttctttttcttgccaaactgctttggttagaacttcagtaagtttgttgaatagaagtgctgaaagttggcatccttgtcttcttcctgaacatggaaagatggctttcagtcttttaccattaagtatgatgttaactttgggtttttttaaattaatgctcttttcatgataaggaatttcccttatatctttagcattttccacaataaaaatatcatgaaagagtactgaattttgtcaggtgctttttctgcatcaattgaaatgatcatgtgatattttttcctacattctattaatgcggtatattatattgcttgatttttatatgttgaaccacccttgcattccagggataaatctcatttggtcatagtatataattttttaaatatactaaacttagtttgctagtattttgttaatttagtattcatatactgaatttagtttgctagaatttagtattttaaagagattctctctttaaaaaaaaaaaaggaaaacatagatctaaattgctttttctgtgccaatctgtactcctcttttcttctcattatttcagaattaaccaaagtaaatattttgttgtgttttgttcaccttttttactttgtttttgtgaacagatagcttccaaaccatatatagatgatataatattgtaaatggtaaatgttatcctttcttacccatttcaatcttgagcttttccaacattattgttcatgagaaattttagttacaactattcacaatggtctcctttcctccaaagaagagaagggtaaattggaaaaataatgttccttgacatttcaacattggagtgcatggagaaatcagtgcttcctacacctccagtagagtgtttttataagctctggttcctgttttatgacctctaaagctttgtcatatcctttgctgttttaaaagtttcagaaaaggttgttcctaaggatagcaagactctgcaaagaatagttctgtgatcttgttctgtagacatggtgttttccagtagttggttcagtgaaataacagattatttatagaaaccaggtggagtcaatatgatggactgagctaactcagaaaagatccttccaaacacacatacatgttaggtgaaatataaacaaaggcaggctctcaaaacataactaagctcaaaagaacgagaaataaatccagataccaaaaacagaggcatcaaagccagcagggttagaggaggtgaagccaaggaggctgcatgggagtatcagaccatgcaaagggctcagaggcagaggtttcatgggttaatgcagggagagaacagcttagtcccatgtgagatataacagaaccctatgcataaagttgcaaattttgtagggatgccattttagtgaaacagaaactagaaaaatttttctccttagattgacagagaagcaatgagtcatcctgtgtgcccagggaaatagatgaaagaaagaattacccactagaaactggaagcccatgcttatatgagaggtccaatttcaggcttcccaatgctacatgctaatatattaatatacaaattgatgtaacccacagggccctagcagaggcaaaagaaaactcattctgaagaactagagcacacacaggaaatgaaccacaatgaagtagagagtccttctgtactaaggataggaaaattagcttcccactagctggaattgcaaggaaagtctgaaagattctataaaatagtgatgaaagaagatacagatatcaaaaagcaagagaagggtagtatgtaagaacaggtggatttggaagaaaaataaaacatatagacatgaaaagtccagtgatttaaattaaaacatattagaaaattttaaagtagtttagataaagctgaagggagaaggggaatgaaaaacatgggagagattgagggatgtggaagatagaatcagatcaatatggagatactgtagatagaagctccaggagaaggtaaaatagagaacggaggggaggcaggaatctcagtgttttctgtaagtgaagatccacaaacattcaagctgttgtagctttccagacctgagcagctgaacaggatataaaaacaaacctataaccagtcatactaaatattgtcatgaaactacagcccatcaaagacaaagggaattattgtaaaagcaaccagaaggaaaagacagattccctgcaaaaaatggcaaactgagtagccttcagtgctgaagacaagaagagatggaaaaatcagagttgtgtgttctgaagtgtttgcattattgaagaagggggttaaattattttctaacttttgaccttgtcaaatatgaaggctagaaatgtaagggtgaccactgaaataaataataaagtattcctctaaaccaaaaaataaaagcaaaaaacatgataaacaggaagcataaaataaatgacaccatttatgcgtatttttaaatataattggatattaattacccatacatatctatgaagcaacagtatgaaatatagactggaaagctgtttcttttttatggaagggagaagaatggcgagtataaggaatttatatttaagactttattattttattaaaatctgaagtaatcatagttaggcctggtcctgacatttgcaggacttggtataagagtaccagtggagaccttgaaccacacataaatatgtgaaagttacaaatcaagctagcaaagaattctgtcccttcatgatgacaccttcataaagcctggtgcgcttcctgattcctggcttatttgaaggccttagccagagtaaggcagcgtgggaaagagctcactccctggacaccctctccatgcttcagaaccccagctctgccctgcactgagggcatctgcgcacgtgtggtgtggtgaacatcccagcccacacatccaggttctgttcacatccccatgcaaaaagcaccccttggccacccccacagacctggggtgtgcacattggctatatggtctacttttagggggatggagctcaggatggagtcaagttagccttggatggaggcctgggtggtcattgagcagggacttctagggtcccaaataactgaggtggtggatggcaggcctgggccatgggagggtgtacctccttggctgtggacccctcacagtgtgtggaggaagggctgcggcacagagtgggtccctctgaagcaagaagtcacatttttaaataatatctcattataggctgagcacagtggctcatgcctgtaatgccagcacttttggaggctgaagtgggcggatcacctgaggtcaggagttcaagaccagtctggccaacacggcaaaaccccatcgctactaaaaatacaaaaattagccaggcctggtggcaagtgcctgtaatcccagctactcaggaggctgaggcaggagaatcgcttgaacctagtaggcagaggctgcagtgagccgagattgcgccactgcactccagcctgggcaacaagcaagactctgtctcaaaaacaaaaagaaaaaaattaattataaaaaaagaagacagagaaaagcattcaccactctaggcggcatctaggcggcgtctgccagcacaggagccctgccagcaaagccccatctgacctttgtcaagttatttgacacagctgagtctgttttctcacctgcctggtgagaggccaacatgtataatttcaatgatccctcccatttctgaggatctgtgacattctcataagccccatcatgaggaggagcttctgggatggccagggtggttcaggaggcatgtccctgtggtccaggggcatgggggcagagcctagtcctgcatggtctccagcttctgagaaaataatgtgtcagttgcccattatgtccccatgtggggcctggctggtgaggctaccctggggccaggcagggtgaggggccccctctgcacacagtgccctttattttgtgcaggagtcatggccagtgctgggcacgtgttggacagggaggacaggcccttctttatacctgccacattctgaaaccaggcagcacagggagctgtggacagtcggtgatggcagctacacagagggacaggtgccacgggctcactcctcctgtgtttgcacaaccatgccttccagggcaattgctcagccagacccggtgagattaatttggcccatggaagaaagaggagacgggagggaggaccagtgtgaaaggatggagaaagtatttttcttcctcagccatgagacgttttgccaagcttagctagctgaggctcacccttaattgggaatgaattaaacattgttatttcaaccaaggcactcagaaatgccctctcctggaaattcaaaatgaacttcagctcaaagaactgtgaagaagagccagggccccactcctctttcaatggccctgagggagctaggtgggtctgcagtcatgggaggggcctcctcaggctccaggctcactgatcgatcgggggcagggtacatgggattcaagcacctgcagcttcttctacaactccgtatcccctcacgttcccacaaacgtaaggggggtctgtatttgtctgcctgggctgccgcaataaagtgccataggctgtgtggcttaaacagcagaaattgagtttgtcacagtctggaggctggaagtccatactcgagctacctacagattggtttctcatgcgagcactctccttggcttacaggtggctgtgtgctctgtggtcttccctccgtgtatgcctgtgtcctcatctcctcttcttattaggacagcagccatgctggattagggcccaccctgatgacctcatttcaccttaattaccactttaaaggccctgtttccaaatacagtcccattctgaggtactaggggtaaagacttcaacatgtgaatttagaggggacaccattcagcccataatctattatgcctctaggtcactggcaaactcctgtaatgacaagcgaaatgagagcctgatagtaaaaatcaaagcactttgacctgcctgggcagttttcaagcagtccctttgggcttatagaaataaacagactgggcatggtggctcacacctgtaatcctagcactttgggaggccgaggcaggaggatcacttgaagccaggagtttgagaccagcttgggcagcaaagcaaggccctgtctctgcaaaaaatgtttaaaattagccaggtgtggtgatgcacacctggggtcccagctactcaggaggctgaggtgggagagttgcttgagcccaggagttcgaggctgcagtgagctatgattgtgccactgcactccagtctggacgacagtgagaccccatctttttaaaaaaataaaatagtatagaaatagccaagctccagaacagttccacatgtcttcacagcagtggcaaccttgaagggaataggttcaggaaaggcagggactgctccttagccgtctgttttagaagaaaacgccttgatgttcattggggttcaaaataatcaagttctgcagaacgaagctgggctgtggctggggtcctgaggcctccgcggggctctcaccccgtgcaggcagggggctgcaggcaggagtgaggcgcggagatgtttacccgggaaacaggcctctccttggagaagtgtcctgaaaagcccacggtcccgcgggtatggaccgggcacatgcacacttcagcgagcaggaagcgctggctaagggagggactggaaacggcgttttccacaacagggagccagcattgaggcgcccagatggcatctgctggaaatcacgggccgctggtgaagcaccacgccttacccgacgtggggaggtgatcccccacctcatcccacccccttctgtctgtctccttgtgcaacccgagtgttcaggtgacaagagactgacgcgcttgctttatccgcaggctgaacgagcgcgaccgcctgatcaagaggctgggccggaagacgcccccgacgctgttccggggcagctccctgcagcagggcgtcccgcgtgagtaccgcgggtgggggctgatggaggagtgggtgtcggtgcggggcgggggttgatgaggagttgggggagcgggcgctgatggggggccgggtgagtgctgacggggggtgggggcggggcgtgcgtttggaagtggaactgcaaaatgtgtatttggccccaggaacgtgcagcttgagtgtaggcaattccctgggaccacaaaatccgtaaacttaaaatcctggtgtggttatgatccttccgtcagcctcccaagaggagttttttaaggttgaagcagtatgacctttaaactgttgcccctaaagatagcaatatgaactgttttgtgtagtgttgccatattgattgaaacaatgaccatcattggggaaaaacatcatgcttctcccaggaaaggctgccccacgtctaagcctggcgtccccctgccacccccgcccccacctccagattccagaggagagtgggaggctgtgaaacatcccctctccactgcccccgactttggagctcagggggagctcatgggcttgtttttagcaatccagtcatcagatcccagctgaggcagatccaggccaccttccccagggccaaggccaacccagccctgcctctctgtgtcctgcggccttccccagccccctctccacccccatcacgtgcacacgccagcttttcctcccatacttactccctgcctccctttcccttccggaggagtttagagggaaacgactggtagaaagagatgagttgggccggacgcggtggctcacgcctgtaatcctagaactttcggaggctgaggtgagtggatcacttgaggtcaggggttggagaccagcctgaccgacatggtgaaacctcgtctctactaaaaatacaaaattagctgggcgtgacggcacatgcctgtaatcccagctacttgggaggctgaggcaggagaatcacttgaacctaggaagcggaggttgcagcgagccgaggtcatgccattgcactccagcctgggcaacaagagcgaaacttggtctcaaaaaaaaaaaagaaagaaagaaagaaagagacagatttatgaacgtgaagaatcattgttcacacagtacaggcagtgaaggatctgtgttctgttgagctctgcctgtcaacaggtatttgcagactttctcaatggagagagaaggagggagacagagtatcattgcttttcagtaatctaccccctgtcctcactttcccatgtggaatatcgtatgggaagaaggggactgacatgcttctgtcctttaatgctccactgccctgggaggtgggtaatgccaccccaaggacacaaagcagaggctcaggtcagaaagtgggtggcccagcattgctcagtggcatgccatgaggtctggattgcagcctcagactctggcccaaaagagaggtaagtcaagaagtttgatgggacaggagtgctaactgtagggcagccctctggagatgggctgcctgggttcctgtccctgctcccctgctttttcgtgaccttgggcatgttacttaatgtctgcttctgcatctgtaaagttgggtaatatgagaacttactggatgccagaggttcagtgtaggtcctgccacccacagctgcacagaaagccaatcactgaaacaacaattatagccaaggaagaaggctttatctggtgctatagccaaggaggtggcagattagtcttaaatccatatccttgactgactaaaattaggggtttatatagcagggaagaaatgttaacaatgtgtaagaaaacaggaatcagtaggggtaaggaagcaatcaagatgaatgaggggcttagcatctcgttgtctggatgagatcattgggtgagtttcagatctttgctacttttcgagaggcctgtgggtccctacctaaggaaggaactcagataaaacaaatacaaatgtcaagctttaagaccagaagggtcatttctatgttaaaaaaacaaaaaaacaaaaacaaaactgtctatgggactattgggttggtttcaattaggaggattaaatgagatcataaagataaagtgtctatataggcaatatagggtccaataaatgttgggtattattattctgccattagctgaataattttgggaaacttaatttctctaaatttttattttctcctgtggagaaaaaagaattttaatgatatacatcttacacagtcctgtgagtcttcatgacagcatgtgtaaagcaccttctgtatgccagacacagagaaaacacatacaggttcccagaactctacagggtctgttctgttgagccgtgttgcctctctgatgaatgtttcaaaataaccatagacagaatatacacgatatatatgttgtgatcaaagaccgaatgagaatttttatgggagagtcataaatgtcttaaagacaactactaaatgcttttcttaagtcaatattttgaaggccaaaaaaaaatctactgaataaatataagaaataagaaggcttctgaaatcacaccacattttttaaacattcagtgactagtaccagaacctgatggataacttaggacgtttctgtcactaacagccagagaagatcgtcgggtggtcagagctggtcctggggtgcaggatgggcatatagcaggtctcagcctttgatgttccgcctgggtctgtccaggaaactagcaggaaaaactctaatcttggtagtattttagttcctgtgagccaccaacatacaatatttgtaatcagcatttcctacacagtctgatttcctctttgtccccatggtcttctcatttctatggctattaggaatctttccagacaggaaactgctattttcattaagatgctatcagagcacagattcaaaggaatgctacttaaggggagttttattccaaaataatgaaaaaaaaagacataattttatggatttcaccaaatgttctacccggagaagacaaaacaactaagaaatccgtctttcctcccacctcctttcacctacacgattctgttctccattctggctgtggctgtttaagaaagcagatgctttaggaagccagccagggaaagttcagttagttgggtccatgagagctccctccaggcccccatcaggacttttctggctgttaggacttcctgaaacatgagtgaaagtagggagtgcaaagagctggaggcttcctccgagctccccgtttggatgcaaatgacagttaaaggttcattaggcagagctggggagcaggtctgtatcttcatccggtgggacagaggctgggcaggcaggactggttgaggggtgatggtgtctggttttccagtaaaactcctcccatgacagctctaactcccgccaggcctggtttctaagaggaaaatgtttaatctgaaattttatctgaacatgggaggactccctctcccaagataaacctatcaggccattctcctttcactcttgaattgtagagtccactttcattctcggttaaggttaagaaagtcttagcgtacaacacgctggaaatgtggtggtaggtgcagccaatgggaactagggaggatggtgggagacatttagcacagacctcacgttgctctacttaccctgggaggtttacaacaggaggggcaactcttctctgcctgtctcttcaaagggaaacctcgaaacccttcccatcccagaggggccaaatcatcccgctgcaatcccatgggaggcccttgtggccatggcactaatgcacacagaagaagtgacagagttatgagctgaagaaacccccggagttgggtttccagtagacacaggcatgttatggaaaacaagataaataaaagaaaaggcttttgcaccttccatttgaacagggagtagactattccaaaggctaagatacctttcccgaaaggacactccctaatttatttttatgtctccatgagttccccccaaccaggagaaaaaagcaggccaaaagaggtataataggtagttaattattctttttggatggactgttgacaccgaccctttcttttctgacgtggatgcagaggcctccgtgttggtgcagtgtgaactagcactgacagagggagagaatcctgcagcctgggtgtgacgggccatgaacatgtcctggagcccatagagaggactggaggttgagagaacttgggccttgcctggtccaggccatttaatttacagaaaagtacatcaagacccagggagcttaaagagcccaaagtcacatggacaagtagcagcaagcaaggactagaaccaccctttgtttcctggccaccaccctgaccccatgctgcagccacttggggccaccagaatctaagatgaaaacaagcgagtggagaaagacatcttcagggtggagagctcagtagtcctcagcttcccaccggaagagtttataaaagagtatgtcccattctttggggtgactgttctttactcagaaccacttctgtaggactgaggagcagccccgggagtggtgcagcagctgtggagccagtgacgaccctgccattgcagctgctgttctgccaggccccctcaggatgacttcagatgtggactagaaacgttccttgttaaagaactggagaatggaaattgtccaagttgaccacagtacatagccttgttactggagcagacgaagcagtgttatttgctagattttgctttgaaacatcccaaggaaagacgtctcctcttggactgcagtaaaaatgcttcataaagggcagcttgtacaggattggggatgagagtgtgtgtgccacacggtgccagagggaggcaggaggctggggcagctcctccaaagctgggcaacggaggtttccttgtccctgctgctaatctctgattaagcaacttggtgaaaatccaaaagctcttaggagaacaggagtggtggcatttgctcttcggtgcttggaagcagatcatgtgaaaactctaaagccctgagaatcaaagcacagccacctacctggtcaggaagttcaagtgcactaggtgtgggcccaaggctggcacaagcatatccgcccccaagggagctcccctccaggctgatgctgccttcaggctcagacacccacctgctcctgtacccagctgtctgagggctcacaatggtctgggagctgcttcactgtggctaccatgtggtgggaatttttggtttgtaggttttgttttgctagaaatggaggtgagcaagtagacaaaagccccctgtggaagattcctctctgttctgttctcttctgttctgttcaccctggctcagcttgtatcaccttctctcccgcccactgtctcttcctcctgtggcctcactggtctgggccctcctccctgctgctcagcccatgtcctcagtcaactctcaggccacctctgcagacaagcccttgcctcccccgataacccccctgagcctttgggattctcaggcagtggccagaaggcatgctctctggaagagccgggaagccagcccaggaccgggactctcagttatgggaacacacagagtaagaaaacagcctgagtgtcttcttttaaagtctcctcctcttctccatcccacgaggactcttctgtcttgttactgtatgtcttgatactctagaaatttcctttttaagccagatgcctcaggaaattaacaggcagtccaggaactgattcatgggcacccttttcgacttcttttctccttttaaagagtatgacagtgaactcacagctcccctgataagttgtacgcatgcatggatggaattcaagattgtcaggtttttttattgtgttgtcttttggccagaatgtctaattgagctgtgggacttttccagacccctgacacagaagggttagccaatggagagcaggccttataaatgtctttctgtgggaagggccagttggaagaaaagccccactctgggcttgtgaacactaaagctggttctcagctctagagtgtggaccctgggtttgcttcccaactctgccactcacgaggtctgtgaccttgggcaggtcacaaaaatctctgtgcctcagttttctcatctgtgaagtgggaggagtataatcccctatctcatagggtttctgggaggattaaatgagctttattttatagcacagtgtcttagacacatggcatttaatgagtcttggctattatttattttattaatagtatatgaactgattgtgtaagaatagtctttgtatggccacaggtccaatcaatcactaaattccttttgagtttattgtgtaacctttttctttacatggaaacaaccctactttgattacttattaccagtccagatcagtctgatttaaaaacagggctgggtgtggtggctcaggcctgtaatcccagcactttgggaggccaaggtggacagattgcttgaggtcaggagtttgagaccagcctggccaacatggtgaaaccccgtctctactaaaaatacaaaaaaaaatagctgggcgtggtggtgcatgcctgtagccctagctactcaagaggctgaagcaggagaattgcttgaaccctggaggcagaagttgcagtgagctgggatcgcgccactgcactccagcctaggcggcagagcaagactctgtctcaaataaataaacaggaaggctccaggtatcacgtgcattttgccagcttgcactattagtgttgtgtgtgtgtttccctggcatgtttacagcttcataaattagctggctgccctacagcatcaggcagacaggagtgttttttcttaattggcagtgggaaagtggagtcggggaccagtgacccactgtgtgtgattcccacactgagctcagccgcagccccctagaaataggaaacctaccctcagaggctttcccttcccagcatcagcagctagaaccatgggaccccagttagcctgcacacggccgccacggcccctctatggccacaggtttcttcatctcaagcctccacctatccaaggctaaggaggccagatgtcgcactcacccgcacgctgccaaaaaaaagcagcttattttaaacctagtgtgctcccccaattctcctgttaaccagtttctcctgtgtgcttcactttcagatgggtatgctttttctcaagaagaacacggagctgttagtcaggaagaagtcatccgtgcttatgacaccaccaaaaagaaatccaggaagaaataagacatgaattttcctgactgatcttaggaaagagattcagtttgttgcacccagtgttaacacatctttgtcagagaagactggcgtcagcagccaaaacaccaggaaacacatttctgtggccttagccaagcagtttgttagttacatattccctcgcaaacctggagtgcagaccacaggggaagctatctttgccctcccaactcgtctgcagtgcttagcctaacttttgtttatgtcgttatgaagcattcaactgtgctctgtgaggtgtgaaattaaaaacattatgtttcaccaatatttaaacatcagtactagttgtcctgggagaaagggaaaggagttttatgttgcgtgagaggcccatcctgtgtaattggagcagggcacacttgcttcctgttgagttaactcagaggttaagtccaacgggccacatgcagacttcactgtaggcaggttgctctcctgctttgattcctgttttgtgtgtaaaattggcataaacttcttgattgcagtgaaatcacaaaattctctatcggggtggtcaacctgagaacatttattggaacctcttagccacatttccagcagggcaaaccaactgatgccctggaagagtcttccgcaccctctccaggtgcactcggcccagtcctgccgccgtgtccaggcgcccctcacccccacacctgctgcatggctggccacaccactcagtgcatggcggccgatgggcagccaacccaaacccgcgcctttccttgttccactgcagactcagatacagatgcgaaaaattccttcttccaccgcccttctcgttctgtaaagaaagaaaagaaacatagcctttctgcatatattctaaacgtctctctgcctctgtctgacatggggccaccccacaggtcagagtggtggtagaaccccttcaggactcccagccgtggtcaggctctgaatactcccttcccaacatccagactgctgggcctttggcatccacttacattagaacccacgtttgtttcagagcacattttggactttcactgttgggaaatgaatgaatttataacatgcctgcacagcgaaggaacacacctgtcgctcttagctctagagtcagaggatgagtaaacccagatgcaagagtataggacattgagtggggagaacaagacgaccacagaagtcctcagaaggagaaggaaggacacggagacactgagaggaggacacagaggaatcgccaccagatctttgcagtagaaactctgaaataagccttgagacccagacaattgtcatgatcagcccagtgtgtatgagagcttaaacaagaccttcacacacagttctaattgaaaagaattccaaacatttcagggaaacacctttttaaaaaatatactgacatggtttcctttctgtatcccatcagtgttagacacaggtacctatcagaatacggcatatcctgaattatctaagacaaggaagtgaagagcggaatcactgactttcccaactgcagagtcccacacttaaatctcaacagaacctagatgtcttcaggcatgaatgtgagcacctggagcccttactaaacaacctgcctggagccctgttctctgctctggttgccaaaccagatttttggatggcctaaatacttgtgggcaactgttactggtgaaaaatgggagtggagagcatgttttggattttcactgtggggaaatgaatgaatttatcacatgactgtgcagcgaaggagcacacctgtcactcttagctctagagtcggaggatgagtcaaccctgtaggaatgattgtgctaaattaggaaataacactttagtgcactttgcttcctaacccttttttgtcagaaatctacaacctactgggcatggaaatgatttaaaatatgatctgcattgactaagaaaactcatcctcacttatgaggtgaccaggatgcagagagggcctgaggggcagcagaacaatgcaattcacaggtgaggctccaaaaagggccatttctttctccccaaggtgcatagaacatttttaaatatcagagtacccagcaagacggaaggactgtcatgcaggaactctaacacaaaatgtgcctatgactaacacgacaaaccaaggtgtatggtttctttgcacacccagaaaggtgatggccaagatacagaggagaaacgaaaactggaattgaatgtgcattaggcatcttaactattcatattttgtttcatttgggaactaagcctatttggaaagagtggattagaaattgaattctttgtcaaacagttagctctgtcttgaacttgaagccttccaaatcagaattatgtatttaagtgtgtgtttgtgtttgtttggggtttttgtttcttacattagagttcatattttctgggatttaaggatacaggtgtattttcctattctcttgagaagtagactaaacaatatttgcagtgatgacagacgcacacagaagaaaacattagaagagatgcctttctatcctctcatgtggttgagcattcttacagccaaatgactaaattggctgtaaattggtttctaggaggagcagctgtcactacgtgtgatgtataatatttagccagggccaactcaggggctgtgtcatttgtcctatctttaaattgaggtcagagtgtcacacacaacccctcccctggggcagggtggactggactaggttgcatacgctggctgtcagctcagcaaaaatgccacatggggcttgtcactccgccagacactcactgactcacgggctggcaggtcacgctcggttagcgctccagggcctgactctggattgagctaaactggcagaatccactcaggccaacccttggtctactgctgtgtacagacagcccagtcctgtgttgagtctctcttctcctggatgaccctgca

SEQ ID NO: 4 - protein, 1148 aa, Mus musculus
MSRATSVGDQLEAPARIIYLNQSHLNKFCDNRISTAKYSVLTFLPRFLYEQIRRAANAFFLFIALLQQIPDVSPTGRYTTLVPLVIILTIAGIKEIIEDFKRHKADNAVNKKKTIVLRNGMWHTIMWKEVAVGDIVKVLNGQYLPADMVLFSSSEPQGMCYVETANLDGETNLKIRQGLSHTTDMQTRDVLMKLSGRIECEGPNRHLYDFTGNLHLDGKSSVALGPDQILLRGTQLRNTQWVFGVVVYTGHDSKLMQNSTKAPLKRSNVEKVTNVQILVLFGILLVMALVSSVGALFWNGSHGGKSWYIKKMDTNSDNFGYNLLTFIILYNNLIPISLLVTLEVVKYTQALFINWDMDMYYIENDTPAMARTSNLNEELGQVKYLFSDKTGTLTCNIMNFKKCSIAGVTYGHFPELAREQSSDDFCRMTSCTNDSCDFNDPRLLKNIEDQHPTAPCIQEFLTLLAVCHTVVPEKDGDEIIYQASSPDEAALVKGAKKLGFVFTGRTPYSVIIEAMGQEQTFGILNVLEFSSDRKRMSVIVRLPSGQLRLYCKGADNVIFERLSKDSKYMEETLCHLEYFATEGLRTLCVAYADLSENEYEEWLKVYQEASIILKDRAQRLEECYEIIEKNLLLLGATAIEDRLQAGVPETIATLLKAEIKIWVLTGDKQETAINIGYSCRLVSQNMALILLKEDSLDATRAAITQHCTDLGNLLGKENDVALIIDGHTLKYALSFEVRRSFLDLALSCKAVICCRVSPLQKSEIVDVVKKRVKAITLAIGDGANDVGMIQTAHVGVGISGNEGMQATNNSDYAIAQFSYLEKLLLVHGAWSYNRVTKCILYCFYKNVVLYIIELWFAFVNGFSGQILFERWCIGLYNVIFTALPPFTLGIFERSCTQESMLRFPQLYRITQNAEGFNTKVFWGHCINALVHSLILFWVPMKALEHDTPVTSGHATDYLFVGNIVYTYVVVTVCLKAGLETTAWTKFSHLAVWGSMLIWLVFFGVYSTIWPTIPIAPDMKGQATMVLSSAYFWLGLFLVPTACLIEDVAWRAAKHTCKKTLLEEVQELETKSRVMGKAMLRDSNGKRMNERDRLIKRLSRKTPPTLFRTGSIQQCVSHGYAFSQEEHGAVTQEEIVRAYDTTKENSRKK

That which is claimed is:

1. An isolated peptide consisting of an amino acid sequence selected from the group consisting of:
(a) an amino acid sequence shown in SEQ ID NO:2;
(b) an amino acid sequence of an allelic variant of an amino acid sequence shown in SEQ ID NO:2, wherein said allelic variant is encoded by a nucleic acid molecule that hybridizes under stringent conditions to the opposite strand of a nucleic acid molecule shown in SEQ ID NOS:1 or 3;
(c) an amino acid sequence of an ortholog of an amino acid sequence shown in SEQ ID NO:2, wherein said ortholog is encoded by a nucleic acid molecule that hybridizes under stringent conditions to the opposite strand of a nucleic acid molecule shown in SEQ ID NOS:1 or 3; and
(d) a fragment of an amino acid sequence shown in SEQ ID NO:2, wherein said fragment comprises at least 10 contiguous amino acids.

2. An isolated peptide comprising an amino acid sequence selected from the group consisting of:
(a) an amino acid sequence shown in SEQ ID NO:2;
(b) an amino acid sequence of an allelic variant of an amino acid sequence shown in SEQ ID NO:2, wherein said allelic variant is encoded by a nucleic acid molecule that hybridizes under stringent conditions to the opposite strand of a nucleic acid molecule shown in SEQ ID NOS:1 or 3;
(c) an amino acid sequence of an ortholog of an amino acid sequence shown in SEQ ID NO:2, wherein said ortholog is encoded by a nucleic acid molecule that hybridizes under stringent conditions to the opposite strand of a nucleic acid molecule shown in SEQ ID NOS:1 or 3; and
(d) a fragment of an amino acid sequence shown in SEQ ID NO:2, wherein said fragment comprises at least 10 contiguous amino acids.

3. An isolated antibody that selectively binds to a peptide of claim 2.

4. An isolated nucleic acid molecule consisting of a nucleotide sequence selected from the group consisting of:
(a) a nucleotide sequence that encodes an amino acid sequence shown in SEQ ID NO:2;
(b) a nucleotide sequence that encodes of an allelic variant of an amino acid sequence shown in SEQ ID NO:2, wherein said nucleotide sequence hybridizes under stringent conditions to the opposite strand of a nucleic acid molecule shown in SEQ ID NOS:1 or 3;
(c) a nucleotide sequence that encodes an ortholog of an amino acid sequence shown in SEQ ID NO:2, wherein said nucleotide sequence hybridizes under stringent conditions to the opposite strand of a nucleic acid molecule shown in SEQ ID NOS:1 or 3;
(d) a nucleotide sequence that encodes a fragment of an amino acid sequence shown in SEQ ID NO:2, wherein said fragment comprises at least 10 contiguous amino acids; and
(e) a nucleotide sequence that is the complement of a nucleotide sequence of (a)-(d).

5. An isolated nucleic acid molecule comprising a nucleotide sequence selected from the group consisting of:
(a) a nucleotide sequence that encodes an amino acid sequence shown in SEQ ID NO:2;
(b) a nucleotide sequence that encodes of an allelic variant of an amino acid sequence shown in SEQ ID NO:2, wherein said nucleotide sequence hybridizes under stringent conditions to the opposite strand of a nucleic acid molecule shown in SEQ ID NOS:1 or 3;
(c) a nucleotide sequence that encodes an ortholog of an amino acid sequence shown in SEQ ID NO:2, wherein said nucleotide sequence hybridizes under stringent conditions to the opposite strand of a nucleic acid molecule shown in SEQ ID NOS:1 or 3;
(d) a nucleotide sequence that encodes a fragment of an amino acid sequence shown in SEQ ID NO:2, wherein said fragment comprises at least 10 contiguous amino acids; and
(e) a nucleotide sequence that is the complement of a nucleotide sequence of (a)-(d).

6. A gene chip comprising a nucleic acid molecule of claim 5.

7. A transgenic non-human animal comprising a nucleic acid molecule of claim 5.

8. A nucleic acid vector comprising a nucleic acid molecule of claim 5.

9. A host cell containing the vector of claim 8.

10. A method for producing any of the peptides of claim 1 comprising introducing a nucleotide sequence encoding any of the amino acid sequences in (a)-(d) into a host cell, and culturing the host cell under conditions in which the peptides are expressed from the nucleotide sequence.

11. A method for producing any of the peptides of claim 2 comprising introducing a nucleotide sequence encoding any of the amino acid sequences in (a)-(d) into a host cell, and culturing the host cell under conditions in which the peptides are expressed from the nucleotide sequence.

12. A method for detecting the presence of any of the peptides of claim 2 in a sample, said method comprising contacting said sample with a detection agent that specifically allows detection of the presence of the peptide in the sample and then detecting the presence of the peptide.

13. A method for detecting the presence of a nucleic acid molecule of claim 5 in a sample, said method comprising contacting the sample with an oligonucleotide that hybridizes to said nucleic acid molecule under stringent conditions and determining whether the oligonucleotide binds to said nucleic acid molecule in the sample.

14. A method for identifying a modulator of a peptide of claim 2, said method comprising contacting said peptide with an agent and determining if said agent has modulated the function or activity of said peptide.

15. The method of claim 14, wherein said agent is administered to a host cell comprising an expression vector that expresses said peptide.

16. A method for identifying an agent that binds to any of the peptides of claim 2, said method comprising contacting the peptide with an agent and assaying the contacted mixture to determine whether a complex is formed with the agent bound to the peptide.

17. A pharmaceutical composition comprising an agent identified by the method of claim 16 and a pharmaceutically acceptable carrier therefor.

18. A method for treating a disease or condition mediated by a human transporter protein, said method comprising administering to a patient a pharmaceutically effective amount of an agent identified by the method of claim 16.

19. A method for identifying a modulator of the expression of a peptide of claim 2, said method comprising contacting a cell expressing said peptide with an agent, and determining if said agent has modulated the expression of said peptide.

20. An isolated human transporter peptide having an amino acid sequence that shares at least 70% homology with an amino acid sequence shown in SEQ ID NO:2.

21. A peptide according to claim 20 that shares at least 90 percent homology with an amino acid sequence shown in SEQ ID NO:2.

22. An isolated nucleic acid molecule encoding a human transporter peptide, said nucleic acid molecule sharing at least 80 percent homology with a nucleic acid molecule shown in SEQ ID NOS:1 or 3.

23. A nucleic acid molecule according to claim 22 that shares at least 90 percent homology with a nucleic acid molecule shown in SEQ ID NOS:1 or 3.
